(19) United States
(12) Patent Application Publication
(10) Pub. No.: US 2024/0254520 A1
(43) Pub. Date: Aug. 1, 2024

(54) POLYPEPTIDES AND COMPOSITIONS WITH LYTIC POLYSACCHARIDE OXIDASE ACTIVITY

(71) Applicants: INSTITUT NATIONAL DE RECHERCHE POUR L'AGRICULTURE, L'ALIMENTATION ET L'ENVIRONNEMENT, Paris (FR); IFP ENERGIES NOUVELLES, RUEIL-MALMAISON, CEDEX (FR)

(72) Inventors: Camille FILIATRAULT-CHASTEL, MARSEILLE (FR); Antoine MARGEOT, PARIS (FR); Santa BLANQUET, FOURQUEUX (FR); Jean-Guy BERRIN, ROQUEVAIRE (FR); David NAVARRO, MARSEILLE (FR)

(73) Assignees: INSTITUT NATIONAL DE RECHERCHE POUR L'AGRICULTURE, L'ALIMENTATION ET L'ENVIRONNEMENT, Paris (FR); IFP ENERGIES NOUVELLES, RUEIL-MALMAISON, CEDEX (FR)

(21) Appl. No.: 17/257,168

(22) PCT Filed: Jul. 2, 2019
(86) PCT No.: PCT/EP2019/067771

§ 371 Date: Dec. 30, 2020

(30) Foreign Application Priority Data
Jul. 2, 2018 (FR) 1856094

(51) Int. Cl. C12P 7/10; C12N 9/02

(52) U.S. Cl. CPC C12P 7/10; C12N 9/0083; C12Y 114/99

(57) ABSTRACT

The present invention in general relates to enzymes with a polysaccharide oxidase activity. In particular, the invention relates to the field of second-generation ethanol production by oxidation and enzymatic hydrolysis of materials containing polysaccharides, in particular lignocellulosic biomass. The invention further relates to the field of celluloses, and to method for producing cellulose fibres and defibrillating cellulose substrates.

### SEQUENCE LISTING

[0001] Incorporated by reference herein in its entirety is a computer-readable sequence listing submitted via EFS-Web and identified as follows: One (862 kilobyte ASCII (Text)) file named “2021_07_07_sequence_listing.txt” created on Jul. 7, 2021.

### FIELD OF THE INVENTION

[0002] The present invention relates generally to enzymes with polysaccharide oxidase activity. In particular, the invention relates to the field of second-generation ethanol production by oxidation and enzymatic hydrolysis of materials containing polysaccharides, and lignocellulosic biomass in particular.

[0003] Thus, the invention relates to the field of celluloses, as well as methods for producing cellulose fibers and for defibrillating cellulose substrates.

### TECHNOLOGICAL BACKGROUND

[0004] Lignocellulosic biomass is a polysaccharide substrate and a renewable source for producing biofuels and platform molecules for industry. Its conversion into products of interest, such as saccharides and cellulose fibers, requires the combined action of enzymes, mostly of fungal origin.

[0005] Bearing in mind the complexity and stubbornness of lignocellulosic biomass, its degradation is one of the obstacles in the development of an economically viable 2G bioethanol process.

[0006] To degrade this type of polysaccharide substrate, made up essentially of cellulose, hemicelluloses and lignin, cellulolytic microorganisms generally produce enzyme mixtures containing cellulases, hemicellulases, pectinases and lignolytic enzymes. The concerted action of various enzymes is necessary for optimal degradation of lignocellulose. In particular, the degradation of cellulose requires the coordinated and synergistic action of various types of enzymes. More particularly, efficient conversion of cellulose into small molecules requires the synergistic action of cellulases, i.e. endoglucanases (EGs), cellobiohydrolases (CBHs) and β-glucosidases. The EGs cleave the β-1,4 bonds randomly in the cellulose chains, thus liberating new terminations for the action of cellobiohydrolases (CBHs), which in their turn liberate cellobiose units. The β-glucosidases produce glucose molecules from cellobiose, thus attenuating the inhibitory effect of cellobiose on CBH.

[0007] All the enzymes with activities on carbohydrates are listed in the CAZy database (Carbohydrate Active enzymes, Lombard et al., 2014), in classes (depending on their mode of action) and in families depending on their sequence and structural parameters, which also determine the enzymatic properties.

[0008] For example, the hydrolytic enzymes are in the class of the glycoside hydrolases (GH), and the cellulases in particular are in the families GH5, GH6, GH7, GH12, GH45 and GH48.

[0009] Thus, synergistic effects have been demonstrated for enzymes with oxidative activity acting on cellulose. The first representatives of this family, the “Lytic Polysaccharide Monooxygenases” (LPMOs) were isolated from the filamentous fungi Thielavia terrestris and Thermoascus aurantiacus (Harris et al.; “Stimulation of Lignocellulosic Biomass Hydrolysis by Proteins of Glycoside Hydrolase Family 61: Structure and Function of a large, Enigmatic Family; Biochemistry (Moscl.) 49, 3305-3316; 2010). They oxidize the glycosidic bonds of the chains of polysaccharides, releasing aldonic acids, and thus increase the accessibility of the substrate for the hydrolytic enzymes.

[0010] These monooxygenases (LPMOs) are classified among the enzymes with auxiliary activity (AA) (Levasseur et al., 2014) in the families AA9, AA10, AA11, AA13, AA14 and AA15. The LPMOs with activity on cellulose belong to the family AA9. However, other families of monooxygenases have been discovered: the family AA10 includes bacterial enzymes analogous to AA9, the members of the family AA11 have activity on chitin, those of the family AA13 act on starch, those of the family AA14 act on xylan and those of the family AA15 on cellulose and chitin.

[0011] An enzyme producer often used in industry is the fungus Trichoderma reesei, which is capable of producing large amounts of enzymes. In particular, the cocktail of enzymes called “K975” represents a low diversity of enzymes and is not sufficiently effective. Comparing the genome of T. reesei against other genomes from close species, it can be seen effectively that T. reesei possesses both fewer genes involved in the degradation of the carbohydrates of the plant cell wall, and the enzymes are less diversified.

[0012] Numerous research works have therefore aimed to supplement this mixture with enzymes having higher specific activity or activity complementary to those present in T. reesei, which would make it possible to reduce the dose of enzymes to be used.

[0013] It has thus been shown that an enzyme cocktail from T. reesei containing 7% of the protein AA9 (LPMO) from T. aurantiacus is capable of hydrolyzing 90% of cellulose at 4 mg of protein per gram of cellulose, making it possible to halve the amount of enzymes required. Other members of the family AA9 have been identified in several fungal species, in particular in Podospora anserina, Myceliophthora thermophila or Phanerochaete chrysosporium.

[0014] WO 2018/050300 teaches the identification of LPMOs, and application thereof in a method for producing sugars from lignocellulosic biomass.

[0015] WO 2016/193617 teaches methods for producing nanocelluloses, comprising a step of enzymatic treatment of said substrate with a cleavage enzyme belonging to the family of the lytic polysaccharide monooxygenases (LPMOs), able to ensure oxidative cleavage of said cellulose fibers.

[0016] Despite the new pretreatment strategies, the costs of production of the nanocelluloses are still high, the yields are uncertain, and the quality and properties are variable.

[0017] Therefore there is still a need to identify new enzyme families for treating these polysaccharide substrates, and especially lignocellulosic biomass. In particular, there is still a need to identify families of enzymes capable, alone or in combination with said cocktail from T. reesei, of improving the yield from enzymatic hydrolysis.

[0018] For example, there is still a need for enzyme families capable of hydrolyzing stubborn biomasses such as miscanthus and/or poplar.

[0019] There is also still a need for enzyme families that make it possible to improve the existing methods for obtaining sugars and/or cellulose fibers starting from polysaccharide substrates such as lignocellulosic biomasses.

[0020] The invention aims to respond to these needs.

### SUMMARY OF THE INVENTION

[0021] According to a first aim, the invention relates to an isolated polypeptide with polysaccharide oxidase activity, characterized in that it comprises a sequence having an amino acid identity of at least 20% with a reference polypeptide sequence SEQ ID No. 1 or SEQ ID No. 2, using a BLAST-P comparison method, said BLAST-P comparison method giving an e-value of 1e⁻¹⁸ or less.

[0022] In particular, the invention relates to an isolated polypeptide with polysaccharide oxidase activity as defined above, characterized in that it comprises a sequence having an amino acid identity of at least 80% with a reference polypeptide sequence SEQ ID No. 1 or SEQ ID No. 2, said BLAST-P comparison method giving an e-value of 1e⁻¹⁸ or less.

[0023] Quite particularly, said isolated polypeptide with polysaccharide oxidase activity may be characterized in that it comprises a reference polypeptide sequence selected from SEQ ID No. 5 to SEQ ID No. 382 and SEQ ID No. 383.

[0024] According to a second aim, the invention relates to a composition with polysaccharide oxidase activity, characterized in that it comprises a polypeptide with polysaccharide oxidase activity as defined above.

[0025] In particular, said composition may be characterized in that it further comprises at least one polypeptide with polysaccharide degradase activity selected from: a cellulase, a hemicellulase, a ligninase and a carbohydrate oxidase.

[0026] Said composition with polysaccharide oxidase activity may be characterized in that it is obtainable from one or more organisms of the fungus or yeast type, in particular selected the from genera: Achlya, Acremonium, Aspergillus, Cephalosporium, Chrysosporium, Cochliobolus, Endothia, Fusarium, Gliocladium, Humicola, Hypocrea, Myceliophthora, Mucor, Neurospora, Penicillium, Pyricularia, Thielavia, Tolypocladium, Trichoderma, Podospora, Pycnoporus, Fusarium, Thermonospora; quite particularly Aspergillus or Trichoderma or Podospora; preferably Aspergillus or Podospora.

[0027] Said composition with polysaccharide oxidase activity may be characterized in that said polypeptide with polysaccharide oxidase activity is obtained recombinantly.

[0028] According to a third embodiment, the invention relates to a kit comprising at least:
[0029] a first part comprising a polypeptide with polysaccharide oxidase activity as defined above, or a composition comprising said polypeptide with polysaccharide oxidase activity;
[0030] a second part comprising g a polypeptide with polysaccharide degradase activity selected from a cellulase, a hemicellulase, a ligninase and a carbohydrate oxidase, or a composition comprising said polypeptide with polysaccharide degradase activity.

[0031] According to a fourth embodiment, the invention relates to a host able to express recombinantly a polypeptide with polysaccharide oxidase activity as defined above. Said host may in particular be a yeast, a bacterium or a fungus.

[0032] According to a fifth embodiment, the invention relates to an isolated nucleic acid coding for a polypeptide with polysaccharide oxidase activity as defined above.

[0033] According to a sixth embodiment, the invention relates to a method of obtaining a sugar starting from a polysaccharide substrate, comprising at least one step of contacting said substrate with a polypeptide with polysaccharide oxidase activity as defined above, or a composition with polysaccharide oxidase activity comprising said polypeptide with polysaccharide oxidase activity. Preferably, said substrate is a lignocellulosic substrate.

[0034] In particular, the invention relates to a method of producing alcohol starting from a lignocellulosic substrate, characterized in that it comprises obtaining a sugar by a method of obtaining a sugar as defined above, and the alcoholic fermentation of said sugar by an alcohol-producing microorganism.

[0035] According to a seventh embodiment, the invention relates to a method for preparing a cellulosic substrate for producing cellulose fibers, said method comprising at least the following steps consisting of:
[0036] a) providing a cellulosic substrate able to form cellulose fibers;
[0037] b) in the presence of an electron donor, contacting said substrate with at least one polypeptide with polysaccharide oxidase activity in conditions suitable for ensuring oxidative cleavage of said cellulose fibers; characterized in that said polypeptide with polysaccharide oxidase activity has an amino acid identity of at least 20% with a reference polypeptide sequence SEQ ID No. 1 or SEQ ID No. 2, using a BLAST-P comparison method, said BLAST-P comparison method giving an e-value of 1e⁻¹⁸ or less.

[0038] According to an eighth embodiment, the invention relates to a method of defibrillating a cellulosic substrate, said method comprising at least the following steps consisting of:
[0039] a) providing a cellulosic substrate able to form cellulose fibers, which had been brought into contact beforehand with an electron donor and a polypeptide with polysaccharide oxidase activity, in conditions suitable for ensuring oxidative cleavage of said cellulose fibers in the presence of an electron donor; and
[0040] b) treating said cellulosic substrate mechanically, in order to defibrillate said substrate, characterized in that said polypeptide with polysaccharide oxidase activity has an amino acid identity of at least 20% with a reference polypeptide sequence SEQ ID No. 1 or SEQ ID No. 2, using a BLAST-P comparison method, said BLAST-P comparison method giving an e-value of 1e⁻¹⁸ or less.

[0041] According to a ninth embodiment, the invention relates to a method of producing cellulose fibers, said method comprising at least the following steps consisting of:
[0042] a) providing a cellulosic substrate able to form cellulose fibers;
[0043] b) in the presence of an electron donor, contacting said cellulosic substrate with at least one polypeptide with polysaccharide oxidase activity in conditions suitable for ensuring oxidative cleavage of said cellulose fibers;
[0044] c) treating said cellulosic substrate mechanically, in order to produce said cellulose fibers starting from said cellulosic substrate,
   characterized in that said polypeptide with polysaccharide oxidase activity has an amino acid identity of at least 20% with a reference polypeptide sequence SEQ ID No. 1 or SEQ ID No. 2, using a BLAST-P comparison method, said BLAST-P comparison method giving an e-value of 1e⁻¹⁸ or less.

[0045] According to a tenth embodiment, the invention relates to cellulose fibers resulting from a defibrillation process and/or a method of producing cellulose fibers as defined above.

### DESCRIPTION OF THE FIGURES

[0046] FIG. 1: Monitoring the hydrolysis yield over time, with the cocktail from T. reesei; on three pretreated biomasses. The error bars represent the standard deviation calculated 3 for replicates. Ordinate: hydrolysis yield on three pretreated biomasses A. On straw; B. On miscanthus; C. On poplar (expressed in percentage relative to the cellulose available in the initial substrate). Abscissa: time in hours starting from the hydrolysis time 0. Curve A. On straw: Increase in hydrolysis yield up to a value of 90% at Time (h) 140. Curve B. On poplar: Increase in hydrolysis yield up to a value of 60% at Time (h) 140. Curve C. On miscanthus: Increase in hydrolysis yield up to a value of 50% at Time (h) 140.

[0047] FIG. 2A-2C: Change in hydrolysis yield in the presence of secretomes derived from the strain CIRM-BRFM 1490 of Aspergillus japonicus, relative to the hydrolysis yield in the presence of the reference cocktail alone. A. On straw B. On miscanthus C. On poplar. The mean values were calculated on 7 to 15 replicates per point (the asterisks * indicate the mean values for which the Student test relative to the reference gives a p-value <0.05). Ordinate: Improvement in hydrolysis yield, the values of which are characterized from −15% to 15%. Abscissa: the various secretomes of the strain CIRM-BRMF 1490, depending on the substrates on which they were produced (AMB: autoclaved maize bran, SBP: beet pulp, Avicel), tested in supplementation of the reference cocktail on one of the three biomasses at 24, 48 or 96 h of hydrolysis. A. On straw: The lighter boxes illustrate the performance of the secretomes on straw at 24 h (to the left of each entry) and the darker boxes illustrate the performance of the secretomes on straw at 48 h (to the right of each entry). B. On miscanthus: The lighter boxes (on the left) illustrate the performance of the secretomes on miscanthus at 24 h and the darker boxes (on the right) illustrate the performance of the secretomes on miscanthus at 96 h. C. On poplar: The lighter boxes (on the left) illustrate the performance of the secretomes on poplar at 24 h and the darker boxes (on the right) illustrate the performance of the secretomes on poplar at 96 h.

[0048] FIG. 3: Conservation of the catalytic module and consensus sequence. Graphical representation of the consensus amino acids during alignment of 378 X273 modules, generated using the WebLogo application (Crooks et al., 2004). Ordinate, unit of sequence conservation expressed in bits. Abscissa, position in the reference consensus sequence of the module. The size of the amino acids is represented as a function of the frequency observed, as defined according to the algorithm given in Crooks et al. (2004).

[0049] FIG. 4: Synergy of the X273 with CBHI for the liberation of cellobiose from cellulose nanofibrils. The enzymes AaX273 and Pax273 (8 μg) reacted with a mixture of cellulose nanofibrils (CNFs) at 0.1% for 16 h in the presence of ascorbate (1 mM), then the CNFs were washed and hydrolyzed with cellulase CBHI from T. reesei (0.8 μg) for 30 minutes. Ordinate: Area of the cellobiose peaks (in nC·min). Abscissa: (on the left) cellulase CBHI in the presence of CNF, control, (in the center) cellulase CBHI supplemented with enzyme with polysaccharide oxidase activity derived from Aspergillus aculeatus (referenced AaX273). (on the right) cellulase CBHI supplemented with enzyme with polysaccharide oxidase activity derived from Podospora anserina (referenced Pax273). The margin of error represents the standard deviation.

[0050] FIG. 5: Concentration of glucose liberated after 24 h of hydrolysis of miscanthus with the reference cocktail, with or without addition of X273. Sequential assay: the X273 (2.2 μM) acted for 24 h, then the cocktail K975+SP188 (1 mg/g DM) was added for 24 h. Simultaneous assay: the X273 and the cocktail K975+SP188 were added together for 24 h. The error bars represent the standard deviation calculated on 3 replicas. Ordinate: concentration of glucose liberated (in g/L). Abscissa: (on the left) miscanthus substrate in the presence of T. reesei cocktail, control, (in the center) in the presence of T. reesei cocktail supplemented with enzyme with polysaccharide oxidase activity derived from Aspergillus aculeatus (referenced AaX273). (on the right) in the presence of T. reesei cocktail supplemented with enzyme with polysaccharide oxidase activity derived from Podospora anserina (referenced Pax273). For each of the three experiments, two types of hydrolysis are carried out, sequential (on the left) or simultaneous (on the right).

[0051] FIG. 6: Improvement in the accessibility of cellulose by X273, by measuring the cellobiose liberated in the presence of a cellulase from Trichoderma reesei (CBH1). The test is carried out on PASC (Phosphoric Acid Swollen Cellulose), treated in the absence of enzyme X273 (left-hand column), in the presence of AaX273 derived from Aspergillus aculeatus (SEQ ID No. 2), AjX273 derived from Aspergillus japonicus (SEQ ID No. 383), PfX273 derived from Pestalotiopsis fici (SEQ ID No. 175) or ApX273 derived from Aureobasidium pullulans (SEQ ID No. 208)—from left to right. Ordinate, amount of cellobiose liberated, expressed in mg/L.

### DETAILED DESCRIPTION OF THE INVENTION

[0052] In order to overcome the aforementioned drawbacks of the prior art, the inventors endeavoured to identify secretomes of Aspergillus capable of supplementing a reference cellulolytic cocktail derived from T. reesei on a series of so-called stubborn lignocellulosic biomasses, such as straw, poplar or miscanthus.

[0053] For this purpose, the inventors produced secretomes starting from cultures in different conditions and from several strains of Aspergillus, selected from the collection of CIRM-CF (International Center for Microbial Resources—Filamentous Fungi) of INRA.

[0054] In particular, secretomes giving the greatest improvements in hydrolysis yield of miscanthus were selected.

[0055] A protein of interest appeared during exploration of the contents of the secretomes, which is only present in the secretomes capable of improving the hydrolysis of miscanthus. It had not been recognized during CAZy annotation. However, comparing its sequence with the database of the NCBI BLAST tool, and using a server for prediction of 3D structure, it was found that this protein contains a module having similarities with those found in the AA10 family, followed by a C-terminal extension predicted as a disordered region. After verification using the CAZy tools, it was then established that this protein does not belong to the AA10 family, but to a family not yet characterized called X273 (CAZy internal referencing).

[0056] Surprisingly, it was shown that this family of enzymes displays behavior of the polysaccharide oxidase type (LPMO), which is materialized in particular by the presence of a copper ion within its active center and the production of H₂O₂ in the presence of an electron donor such as ascorbic acid.

[0057] It has also been shown that, in the presence of cellulases, this enzyme family displays synergistic activity on cellulose and quite particularly on cellulose nanofibrils (CNFs).

[0058] Without wishing to be bound to any theory, the inventors are of the opinion that the X273 family (also mentioned in the description as polypeptide with polysaccharide oxidase activity according to the invention), present in the fungal genomes, is characterized by a catalytic module belonging to a new LPMO family.

[0059] According to the invention, this new family of LPMOs is therefore characterized by a polypeptide with polysaccharide oxidase activity, comprising a sequence having amino acid identity of at least 20% with a reference polypeptide sequence SEQ ID No. 1 (derived from Podospora anserina) or SEQ ID No. 2 (derived from Aspergillus aculeatus), using a BLAST-P comparison method, said BLAST-P comparison method giving an e-value of 1e⁻¹⁸ or less.

[0060] In particular, according to the invention, this new family of LPMOs is characterized by a polypeptide with polysaccharide oxidase activity, comprising a sequence having amino acid identity of at least 40% with a reference polypeptide sequence SEQ ID No. 1 (derived from Podospora anserina) or SEQ ID No. 2 (derived from Aspergillus aculeatus), using a BLAST-P comparison method, said BLAST-P comparison method giving an e-value of 1e⁻¹⁸ or less.

[0061] In particular, according to the invention, this new family of LPMOs is characterized by a polypeptide with polysaccharide oxidase activity, comprising a sequence having amino acid identity of at least 50% with a reference polypeptide sequence SEQ ID No. 1 (derived from Podospora anserina) or SEQ ID No. 2 (derived from Aspergillus aculeatus), using BLAST-P comparison method, said BLAST-P comparison method giving an e-value of 1e⁻¹⁸ or less.

[0062] In particular, according to the invention, this new family of LPMOs is characterized by a polypeptide with polysaccharide oxidase activity, comprising a sequence having amino acid identity of at least 60% with a reference polypeptide sequence SEQ ID No. 1 (derived from Podospora anserina) or SEQ ID No. 2 (derived from Aspergillus aculeatus), using a BLAST-P comparison method, said BLAST-P comparison method giving an e-value of 1e⁻¹⁸ or less.

[0063] In particular, according to the invention, this new family of LPMOs is characterized by a polypeptide with polysaccharide oxidase activity, comprising a sequence having amino acid identity of at least 70% with a reference polypeptide sequence SEQ ID No. 1 (derived from Podospora anserina) or SEQ ID No. 2 (derived from Aspergillus aculeatus), using a BLAST-P comparison method, said BLAST-P comparison method giving an e-value of 1e⁻¹⁸ or less.

[0064] In particular, according to the invention, this new family of LPMOs is characterized by a polypeptide with polysaccharide oxidase activity, comprising a sequence having amino acid identity of at least 80% with a reference polypeptide sequence SEQ ID No. 1 (derived from Podospora anserina) or SEQ ID No. 2 (derived from Aspergillus aculeatus), using a BLAST-P comparison method, said BLAST-P comparison method giving an e-value of 1e⁻¹⁸ or less.

[0065] In particular, according to the invention, this new family of LPMOs is characterized by a polypeptide with polysaccharide oxidase activity, comprising a sequence having amino acid identity of at least 90% with a reference polypeptide sequence SEQ ID No. 1 (derived from Podospora anserina) or SEQ ID No. 2 (derived from Aspergillus aculeatus), using a BLAST-P comparison method, said BLAST-P comparison method giving an e-value of 1e⁻¹⁸ or less.

[0066] The two reference sequences SEQ ID No. 1 and SEQ ID No. 2 each correspond to the complete form of the polypeptide, including (i) a signal peptide in N-terminal position, as predicted by the SignalP 4.1 software, (ii) the catalytic module including a 1st N-terminal histidine, and (iii) a C-terminal extension.

[0067] The catalytic module is responsible for the polysaccharide oxidase activity, and is characterized by the presence of an active center of the “Histidine brace” type also found in the known enzymes of the LPMO type, and capable of fixing copper.

[0068] The polypeptides with polysaccharide oxidase activity according to the invention are characterized in particular by the presence of an active site formed by two conserved histidine residues, one of the two histidine residues generally being at the N-terminal end of the catalytic module.

[0069] For this reason, the presence of the signal peptide and of the C-terminal extension is optional for obtaining polysaccharide oxidase activity.

[0070] For reference, the sequences SEQ ID No. 3 and SEQ ID No. 4 correspond respectively to the signal peptides of the sequences SEQ ID No. 1 and SEQ ID No. 2.

[0071] For reference, the sequences SEQ ID No. 5 and SEQ ID No. 6 correspond respectively to the catalytic modules of the sequences SEQ ID No. 1 and SEQ ID No. 2.

[0072] For reference, the two reference sequences SEQ ID No. 1 and SEQ ID No. 2 share 45% sequence identity between them, with an E-value of 2e⁻⁵³.

[0073] For reference, the two reference sequences SEQ ID No. 5 and SEQ ID No. 6 share 45% sequence identity between them, with an E-value of 6e⁻⁵².

[0074] In particular, 379 polypeptide sequences, all of fungal origin, have been identified (search made in May 2018 in the nr database of the NCBI BLAST-P tool): i.e. 335 sequences derived from ascomycetes, 41 sequences derived from basidiomycetes and 3 from unclassified fungi (listed as SEQ ID No. 7 to 383).

[0075] Thus, according to certain embodiments, the invention relates to an isolated polypeptide with polysaccharide oxidase activity, characterized in that it comprises a reference polypeptide sequence selected from SEQ ID No. 5 to SEQ ID No. 382 and SEQ ID No. 383.

[0076] According to one embodiment, the isolated polypeptide with polysaccharide oxidase activity according to the invention is able to bind to cellulose, and/or comprises a cellulose binding module.

[0077] According to one embodiment, the invention relates to an isolated polypeptide with polysaccharide oxidase activity, characterized in that it comprises a reference polypeptide sequence selected from SEQ ID No. 2, 34, 40, 50, 51, 60, 61, 82, 84, 86, 87, 89, 93, 97, 103, 110, 121, 146, 156, 166, 174, 179, 181, 185, 188, 189, 207, 210, 220, 227, 233, 239, 266, 270, 273, 285, 287, 291, 297, 300, 310, 319, 326.

[0078] According to one embodiment, the invention relates to an isolated polypeptide with polysaccharide oxidase activity, characterized in that it comprises a polypeptide sequence having at least 20% identity with a reference sequence selected from SEQ ID No. 2, 34, 40, 50, 51, 60, 61, 82, 84, 86, 87, 89, 93, 97, 103, 110, 121, 146, 156, 166, 174, 179, 181, 185, 188, 189, 207, 210, 220, 227, 233, 239, 266, 270, 273, 285, 287, 291, 297, 300, 310, 319, 326.

[0079] According to one embodiment, the invention relates to an isolated polypeptide with polysaccharide oxidase activity, characterized in that it comprises a polypeptide sequence having at least 40% identity with a reference sequence selected from SEQ ID No. 2, 34, 40, 50, 51, 60, 61, 82, 84, 86, 87, 89, 93, 97, 103, 110, 121, 146, 156, 166, 174, 179, 181, 185, 188, 189, 207, 210, 220, 227, 233, 239, 266, 270, 273, 285, 287, 300, 310, 319, 326.

[0080] According to one embodiment, the invention relates to an isolated polypeptide with polysaccharide oxidase activity, characterized that it a in comprises polypeptide sequence having at least 80% identity with a reference sequence selected from SEQ ID No. 2, 34, 40, 50, 51, 60, 61, 82, 84, 86, 87, 89, 93, 97, 103, 110, 121, 146, 156, 166, 174, 179, 181, 185, 188, 189, 207, 210, 220, 227, 233, 239, 266, 270, 273, 285, 287, 300, 310, 319, 326.

[0081] According to one embodiment, the invention relates to an isolated polypeptide with polysaccharide oxidase activity, characterized in that it a comprises polypeptide sequence having at least 90% identity with a reference sequence selected from SEQ ID No. 2, 34, 40, 50, 51, 60, 61, 82, 84, 86, 87, 89, 93, 97, 103, 110, 121, 146, 156, 166, 174, 179, 181, 185, 188, 189, 207, 210, 220, 227, 233, 239, 266, 270, 273, 285, 287, 300, 310, 319, 326.

[0082] Particular embodiments, using a polypeptide with polysaccharide oxidase activity according to the invention, are developed hereunder.

### GENERAL DEFINITIONS

[0083] In general, and throughout the present text, terms of the type “comprise” or “include”, as well as variations thereof, may include elements other than those explicitly mentioned. These terms may, if applicable, be replaced by “consist of”. The articles “a” and “an” also include “more than a” or “more than one”, which includes “a plurality”, or else “two or more”.

[0084] “BLAST-P method” (also called Protein Basic Local Alignment Search Tool method) denotes a method of analysis that is familiar to a person skilled in the art. The BLAST-P method is described in particular in Altschul et al. (1990, J Mol Biol, Vol. 215 (No. 3): 403-410), Altschul et al. (1997, Nucleic Acids Res. Vol. 25:3389-3402) and Altschul et al. (2005, FEBS J. Vol. 272:5101-5109). The BLAST-P method can be carried out using the NCBI tool that is available on line (internet address: http://blast.ncbi.nlm.nih.gov/Blast.cgi?PAGE=Proteins). When the BLAST-P method is used in the present application, it is preferably used according to the following parameters: (i) Expected threshold: 10; (ii) Word Size: 6; (iii) Max Matches in a Query range: 0; (iv) Matrix: BLOSSUM62; (v) Gap costs: Existence 11, Extension 1; (vi) Compositional Adjustments: Conditional compositional score matrix adjustment, (vii) No filter; (viii) No mask.

[0085] As is well known, the score of an alignment, S, is calculated as the sum of the scores for substitution and gap. The scores for substitution are given in a table (see PAM, BLOSUM below). The scores for gap are generally calculated as the sum of G, the gap opening penalty and L, the gap extension penalty. For a gap of length n, the cost of a gap would be G+Ln. The choice of the costs of the gaps, G and L are empirical, but it is usual to choose a high value for G (10-15) and a low value for L (1-2). Optimal alignment signifies alignment of two sequences with the highest possible score.

[0086] In the context of the present invention, the “percentage identity” between two polypeptides denotes the percentage of identical amino acids between the two polypeptide sequences to be compared, obtained after optimal alignment, this percentage being completely random and the differences between the two polypeptide sequences being distributed randomly over their length. Comparison of two polypeptide sequences is carried out conventionally by comparing the sequences after aligning them optimally, said comparison must be able to be carried out segment by segment or using an “alignment window”. Optimal alignment of the sequences for comparing them is performed using BLAST-P comparison software.

[0087] In principle, the percentage identity between two amino acid sequences is determined by comparing the two optimally aligned sequences, within which the nucleic acid sequences to be compared may contain additions or deletions relative to the reference sequence of the optimal alignment between the two polypeptide sequences. The percentage identity is calculated by determining the number of positions in which an amino acid is identical between the two sequences, preferably between two complete sequences, and then by dividing this number of identical positions by the total number of positions in the alignment window and multiplying the result by 100 to obtain the percentage identity between the two sequences.

[0088] As understood in the present application, polypeptide sequences having at least 20% amino acid identity with a reference sequence comprise those that have at least 21%, 22%, 23%, 24%, 25%, 26%, 27%, 28%, 29%, 30%, 31%, 32%, 33%, 34%, 35%, 36%, 37%, 38%, 39%, 40%, 41%, 42%, 43%, 44%, 45%, 46%, 47%, 48%, 49%, 50%, 51%, 52%, 53%, 54%, 55%, 56%, 57%, 28%, 59%, 60%, 61%, 62%, 63%, 65%, 64%, 66%, 67%, 68%, 69%, 70%, 71%, 72%, 73%, 74%, 75%, 76%, 77%, 78%, 79%, 80%, 818, 82%, 83%, 84%, 85%, 86%, 87%, 88%, 89%, 90%, 91%, 92%, 93%, 94%, 95%, 96%, 97%, 98% and 99% amino acid identity with said reference sequence.

[0089] In particular, “polypeptide sequence having at least 20% identity” means the sequences comprising at least 40% identity, quite particularly at least 80% identity, and preferably at least 90% identity with a reference sequence; such as SEQ ID No. 1 or 2.

[0090] Thus, according to certain embodiments, the invention relates to an isolated polypeptide with polysaccharide oxidase activity, characterized in that it comprises a reference polypeptide sequence having at least 40% identity with a reference sequence SEQ ID No. 5 to SEQ ID No. 383.

[0091] Thus, according to certain embodiments, the invention relates to an isolated polypeptide with polysaccharide oxidase activity, characterized in that it comprises a reference polypeptide sequence having at least 50% identity with a reference sequence SEQ ID No. 5 to SEQ ID No. 383.

[0092] Thus, according to certain embodiments, the invention relates to an isolated polypeptide with polysaccharide oxidase activity, characterized in that it comprises a reference polypeptide sequence having at least 60% identity with a reference sequence SEQ ID No. 5 to SEQ ID No. 383.

[0093] Thus, according to certain embodiments, the invention relates to an isolated polypeptide with polysaccharide oxidase activity, characterized in that it comprises a reference polypeptide sequence having at least 70% identity with a reference sequence SEQ ID No. 5 to SEQ ID No. 383.

[0094] Thus, according to certain embodiments, the invention relates to an isolated polypeptide with polysaccharide oxidase activity, characterized in that it comprises a reference polypeptide sequence having at least 80% identity with a reference sequence SEQ ID No. 5 to SEQ ID No. 383.

[0095] Thus, according to certain embodiments, the invention relates to an isolated polypeptide with polysaccharide oxidase activity, characterized in that it comprises a reference polypeptide sequence having at least 90% identity with a reference sequence SEQ ID No. 5 to SEQ ID No. 383.

[0096] Similarly, the “percentage identity” between two nucleic acid sequences represents the percentage of identical nucleotide residues between the two nucleic acid sequences to be compared, obtained after optimal alignment, this percentage being purely random and the differences between the two sequences being distributed randomly over the length of the sequences. Comparison of two nucleic acid sequences is performed conventionally by comparing the sequences after aligning them optimally, and said comparison may be carried out segment by segment or using an “alignment window”. Optimal alignment of the sequences with a view to comparing them is performed using BLAST-N comparison software.

[0097] In principle, the percentage identity between two nucleic acid sequences is determined by comparing the two optimally aligned sequences in which the nucleic acid sequences to be compared may contain additions or deletions relative to the reference sequence of the optimal alignment between the two sequences. The percentage identity is calculated according to the number of positions at which the nucleotide residues are identical between the two sequences, preferably between the two complete sequences, and then by dividing this number of identical positions by the total number of positions in the alignment window and multiplying the result by 100 to obtain the percentage identity between the two sequences.

[0098] As understood here, the nucleotide sequences having at least 20% identity with the reference sequence include those having at least least 21%, 22%, 23%, 24%, 25%, 26%, 27%, 28%, 29%, 30%, 318, 32%, 33%, 34%, 35%, 36%, 37%, 38%, 39%, 40%, 41%, 42%, 43%, 44%, 45%, 46%, 47%, 48%, 49%, 50%, 51%, 52%, 53%, 54%, 55%, 56%, 57%, 28%, 59%, 60%, 61%, 62%, 63%, 64%, 65%, 66%, 67%, 68%, 69%, 70%, 71%, 72%, 73%, 74%, 75%, 76%, 77%, 78%, 79%, 80%, 81%, 82%, 83%, 848, 85%, 86%, 878, 88%, 89%, 90%, 91%, 92%, 93%, 94%, 95%, 96%, 97%, 98% and 99% identity of nucleotides with the reference sequence.

[0099] In particular, “nucleotide sequence having at least 20% identity” means the sequences comprising at least 40% identity, quite particularly at least 80% identity, and preferably at least 90% identity with a reference sequence; such as SEQ ID No. 1 or 2.

[0100] The BLOSUM (Blocks Substitution Matrix) matrixes are substitution score matrixes in which the scores for each position are derived from observation of the frequency of substitution of the blocks in local alignments for related proteins. Each matrix is designed for a particular distance of evolution. In the BLOSUM62 matrix, for example, the alignment from which the scores were derived was created starting from sequences not sharing more than 62% identity. The sequences that possess more than 62% identity are represented by a single sequence in the alignment so as not to over represent close members of one and the same family.

[0101] As used here, an E-value (also called Expect Value or e-value) is a parameter that is calculated when the BLAST-P method is used, said parameter representing the number of different alignments with equivalent scores or with better than S whose appearance is expected during a random search in the database. Thus, the lower the E-value, the more significant the score and the alignment will be.

[0102] Thus, an e-value of 1e⁻¹⁸ or less includes the e-values of 1e⁻²⁰ or less, 1e⁻²⁵ or less, 1e⁻³⁰ or less, 1e⁻⁴⁰ or less, 1e⁻⁵⁰ or less, 1e⁻⁶⁰ or less, 1e⁻⁷⁰ or less, 1e⁻⁸⁰ or less, 1e⁻⁹⁰ or less and 1e⁻¹⁰⁰ or less.

[0103] “Cellulosic substrate” or “lignocellulosic substrate” means in all matter of biomass (including the organic materials of vegetable origin, including algae, animal origin or fungal origin) and containing cellulose, in particular in the form of cellulosic fibers (i.e. cellulose fibers).

[0104] “Lignocellulosic biomass” means any biomass that can be used as lignocellulosic substrate. Lignocellulosic biomass may in particular be classified as a function of its origin:
[0105] agricultural residues produced during the growing of various plants intended for food;
[0106] forestry waste of hardwood or softwood, obtained from the wood industry or pulp and paper industry;
[0107] energy-producing plants derived from dedicated crops (i.e. perennial grasses and short-rotation coppice);
[0108] municipal and industrial solid waste.

[0109] For example, a lignocellulosic substrate may be obtained from a lignocellulosic biomass including: poplar, pine, miscanthus, willow, switchgrass, maize, sugar cane, wheat, rice, oat, barley, beet, olive tree, grapevine, cotton, eucalyptus, and fruit trees.

[0110] The cellulosic substrate is obtained advantageously from wood (of which cellulose is the main component), but also from any cellulose-rich fibrous plant, for example such as, cotton, flax, hemp, bamboo, kapok, coconut fiber (coir), ramie, jute, sisal, raffia, papyrus and certain reeds, sugar cane bagasse, beet (and especially beet pulp), citrus fruits, stems of maize or of sorghum, or else annual plants for straw.

[0111] The cellulose substrates may also be obtained from marine animals (such as tunicates for example), algae (for example such as Valonia or cladophora) or bacteria for bacterial cellulose (for example such as bacterial strains of the Gluconoacetobacter type).

[0112] Cellulose derived from primary walls such as the parenchyma of fruits (for example beets, citrus fruits etc.) or from secondary walls, such as wood, will be selected, depending on the applications.

[0113] The cellulosic substrate advantageously consists of a cellulosic material prepared by chemical or mechanical means, starting from any cellulose source as mentioned above (and in particular starting from wood).

[0114] Material containing lignocellulose is generally present, for example, in the stems, leaves, bran, envelopes and rachis of plants or leaves, branches, and wood from trees. In a nonlimiting manner, the material containing lignocellulose may also be herbaceous material, residues from agriculture and sylviculture, municipal solid waste, waste paper, and residues from grinding of pulp and paper. It is to be noted here that the material containing lignocellulose may be in the form of material from the cell wall of the plant containing lignin, cellulose, and hemicellulose in a mixed matrix.

[0115] According to certain particular embodiments, especially those relating to the production of cellulose fibers, the material containing lignocellulose is a lignocellulosic biomass selected from the group consisting of: grass, switchgrass, Spartina, rye grass, reed canary grass, miscanthus, residues from sugar processing, sugar cane bagasse, agricultural waste, rice straw, rice husks, barley straw, maize cob, straw of cereals, wheat straw, canola straw, oat straw, oat husks, maize cane, soybean flour, cornflour, forestry waste, recycled wood pulp fiber, paper sludge, sawdust, hardwood, resinous wood, agave and combinations thereof. In a preferred embodiment, the material containing lignocellulose is selected from a group comprising: cornflour, maize fiber, rice straw, pine wood, wood chips, poplar, bagasse, paper and waste from pulp treatment.

[0116] “Cellulose” means a linear homopolysaccharide derived from biomass (including organic materials of vegetable origin, including algae, cellulose of animal origin as well as cellulose of bacterial origin) and consisting of units (or rings) of glucose (D-anhydroglucopyranose—AGU for “Anhydroglucose unit”) joined together by β-(1-4) glycosidic bonds. The repeating unit is a glucose dimer, also called cellobiose.

[0117] The AGUs possess 3 hydroxyl functions: 2 secondary alcohols (on the carbons in positions 2 and 3 of the glucose ring) and a primary alcohol (on the carbon in position 6 of the glucose ring).

[0118] These polymers are joined together by intermolecular bonds of the hydrogen bond type, thus giving cellulose a fibrous structure. In particular, joining together of the chains formed from cellobiose dimers forms an elementary cellulose nanofibril (with diameter of about 5 nm). The association of elementary nanofibrils forms a nanofibril (with diameter generally varying from 50 to 500 nm; which includes 50, 60, 70, 80, 90, 100, 150, 200, 250, 300, 350, 400, 450 and 500 nm). Arrangement of several of these nanofibrils then forms what is generally called a cellulose fiber.

[0119] The term “cellulose fiber” denotes all of the forms of cellulose obtainable at the end of a process of defibrillation, or delamination of a cellulosic substrate; which includes the forms of cellulose having a size of the order of a nanometer, as well as the forms of cellulose having a larger size.

[0120] The term “nanocelluloses” denotes the various forms of cellulose having a size of the order of a nanometer. This term includes in particular, according to the invention, two families of nanocelluloses: cellulose nanocrystals and cellulose fibrils.

[0121] The terms “cellulose fibrils”, “(cellulose) nanofibrils”, “(cellulose) nanofibers”, “nanofibrillar cellulose”, “(cellulose) microfibrils”, “microfibrillar cellulose”, “microfibrillated cellulose”, “cellulose nanofibrils” are synonyms.

[0122] Each cellulose nanofibril contains crystalline parts stabilized by a sturdy network of hydrogen bonds between chains and within chains. These crystalline regions are separated by amorphous regions.

[0123] By removing the amorphous parts of the cellulose nanofibrils it is possible to obtain cellulose nanocrystals (CNCs).

[0124] The CNCs advantageously comprise at least 50% of crystalline part, more preferably at least 55% of crystalline part. They generally have a diameter in the range from 5 to 70 nm (preferably less than 15 nm) and a length from 40 nm to about 1 μm, preferably from 40 nm to 500 nm; which includes 50, 60, 70, 80, 90, 100, 150, 200, 250, 300, 350, 400, 450 and 500 nm.

[0125] The terms “cellulose nanocrystals”, “nanocrystalline cellulose”, “cellulose whiskers”, “microcrystals” or “cellulose nanocrystal” are synonyms. The term “cellulose nanocrystals” (CNCs) will generally be used hereinafter.

[0126] As used here, a “material containing polysaccharides” includes a substance or a composition comprising polysaccharides.

[0127] The term “polysaccharide” is used in its conventional sense and denotes polymeric carbohydrates made up of long chains of monosaccharides held together by glycosidic bonds. When they undergo hydrolysis, the polysaccharides release the soluble monosaccharides or oligosaccharides of which they are constituted.

[0128] The polysaccharides that are preferably considered are the polysaccharides derived from plants, and quite particularly cellulose, such as that found in lignocellulose.

[0129] This term thus includes any material (or substrate or biomass) comprising at least one (or a plurality of) polysaccharide (s) selected from: cellulose, hemicellulose and pectin; which in particular includes the polysaccharide substrates comprising at least 30 wt % of cellulose and hemicellulose.

[0130] The term “material containing lignocellulose” used here refers to a material mainly consisting of cellulose, hemicellulose and lignin. This term is a synonym of “lignocellulosic material”. Such a material is also referred to as “biomass”. According to this definition, a material containing lignocellulose is an example of a cellulosic substrate able to form cellulose fibers.

[0131] This term thus includes any lignocellulosic material (or substrate or biomass) containing at least 30 wt %, preferably at least 50 wt %, preferably at least 70 wt %, preferably at least 90 wt % of lignocellulose. In this respect, a lignocellulosic material may comprise other compounds such as polypeptides and sugars, which includes fermentable and/or nonfermentable sugars.

[0132] Thus, a material containing lignocellulose that is considered in particular according to the invention may be selected from pine, poplar, straw and miscanthus.

[0133] As used in the present application, an “enzyme oxidizing the polysaccharides” or a “polypeptide with polysaccharide oxidase activity” includes the polypeptides with the following properties:
[0134] said polypeptide produces hydrogen peroxide in the presence of oxygen and an electron-donating compound, such as ascorbates,
[0135] said polypeptide increases, in a dose-dependent manner, in the absence or in the presence of an electron-donating compound, the degradation of a material containing polysaccharides such as lignocellulose, caused by cellulases and/or hemicellulases such as, for example, the xylanases,
[0136] said polypeptide increases, in a dose-dependent manner, in the absence or in the presence of an electron-donating compound, the degradation of a material containing polysaccharides such as lignocellulose, caused by cellulases.

[0137] The term “electron-donating compound” is used here in its usual sense for a person skilled in the art. Thus, an electron-donating compound is a chemical entity capable of donating electrons to another compound. An electron-donating compound is a reducing agent owing to its capacity to donate electrons and is itself oxidized when it donates electrons to another chemical entity. An electron-donating compound as specified above for the properties of oxidation of polysaccharides, includes, nonexhaustively, ascorbates and cellobiose dehydrogenases (CDHs). In the absence of a reducing agent, such as ascorbate, the reducing agent may advantageously be supplied by the biomass (lignin), which can act as electron donor.

[0138] The term “LPMO”, or “Lytic Polysaccharide Monooxygenase”, denotes in its broadest sense, and unless stated otherwise, all of the families listed in the CAZy database (Carbohydrate Active enzymes, Lombard et al., 2014) and able to oxidize polysaccharides. This term therefore includes in particular all of the polypeptides with polysaccharide oxidase activity belonging to the families AA9, AA10, AA11, AA13, AA14 and AA15. This term also includes the LPMOs of type I (capable of oxidizing the glycosidic bonds on carbon Cl), of type II (capable of oxidizing the glycosidic bonds on carbon C4) and type III (capable of oxidizing the glycosidic bonds both at C1 and at C4).

[0139] The term “enzyme degrading the polysaccharides” or a “polypeptide with polysaccharide degradase activity” includes the polypeptides which, besides the polysaccharide oxidases, contribute to the degradation of the polysaccharide substrates such as lignocellulosic biomasses. Thus, polypeptides with polysaccharide degradase activity may be selected from the cellulases, hemicellulases, ligninases and carbohydrate oxidases.

[0140] The cellulases include the endoglucanases, cellobiohydrolases and beta-glucosidases. The hemicellulases include the xylanases, mannanases, xylosidases, mannosidases, arabinofuranosidases and esterases. Thus, the term “cellulase” may include the exo-glucanases, endo-glucanases, cellobiohydrolases, cellulose phosphorylases, pectinases, pectate lyases, polygalacturonase, pectin esterases, cellobiose dehydrogenases, mannanases, arabinofuranosidases, feruloyl esterases, arabinofuranosidases, fructofuranosidases, galactosidases, galactosidases, amylases, acetylxylan esterases, chitin deacetylases, chitinases, and glucosidases.

[0141] The ligninases include the peroxidases, copper radical oxidases (i.e. laccases). The carbohydrate oxidases include the lytic polysaccharide monooxygenases (LPMOs) and the GMC oxidoreductases (i.e. glucose dehydrogenases, cellobiose dehydrogenases).

[0142] The term “chemical treatment” refers to all the chemical pretreatments that allow the separation and/or release of cellulose, hemicellulose and/or lignin. Examples of suitable chemical pretreatments include, for example, dilute acids, lime, bases, organic solvents, ammonia, sulfur dioxide, carbon dioxide. Moreover, wet oxidation and hydrothermolysis at controlled pH are also regarded as chemical pretreatments. The methods of pretreatment using ammonia are described in particular in PCT applications WO 2006/110891, WO 2006/110899, WO 2006/110900, and WO 2006/110901.

[0143] Other examples of suitable pretreatment are described by Schell et al., 2003, Appl. Biochem and Biotechn. Vol. 105-108: 69-85, and Mosier et al., 2005, Bioresource Technology 96: 673-686, and U.S. Publication No. 2002/0164730.

[0144] The term “mechanical pretreatment” refers to all the mechanical (or physical) treatments that allow separation and/or release of cellulose, hemicellulose and/or lignin from a material containing lignocellulose. For example, the mechanical pretreatments include various types of grinding, irradiation, steam explosion and hydrothermolysis. Mechanical pretreatment includes fragmentation of a solid (comminution or mechanical size reduction). Fragmentation of a solid includes the techniques of dry grinding, wet grinding and vibrating ball grinding. The mechanical pretreatment may also include high pressures and/or high temperatures (steam explosion). In certain representations of the pretreatment step, said step may combine mechanical and chemical pretreatment.

[0145] As used in the present invention, the term “biological pretreatment” refers to all the biological treatments that allow separation and/or release of cellulose, hemicellulose and/or lignin from a material containing lignocellulose. The biological pretreatments may involve the application of microorganisms capable of solubilizing lignin (see, for example, Hsu, 1996, Pretreatment biomass, in Handbook on Bioethanol: Production and Utilization, Wyman, ed., Taylor & Francis, Washington, DC, 179-212; Ghosh and Singh, 1993, Physicochemical and biological treatments for enzymatic/microbial conversion of lignocellulosic biomass, Adv. Appl. Microbiol. 39: 295-333; McMillan, 1994, Pretreating lignocellulosic biomass: a review, in Enzymatic Conversion of Biomass for Fuels Production, Himmel, Baker, and Overend, eds., ACS Symposium Series 566, American Chemical Society, Washington, DC, chapter 15; Gong, Cao, Du, and Tsao, 1999, Ethanol production from renewable resources, in Advances in Biochemical Engineering/Biotechnology, Scheper, ed., Springer-Verlag Berlin Heidelberg, Germany, 65: 207-241; Olsson and Hahn-Hagerdal, 1996, Fermentation of lignocellulosic hydrolyzates for ethanol production, Enz. Microb. Tech. 18: 312-331; and Vallander and Eriksson, 1990, Production of ethanol from lignocellulosic material: State of the art, Adv. Biochem. Eng J Biotechnol. 42: 63-95).

Polypeptides and Compositions with Polysaccharide Oxidase Activity

[0146] According to a principal embodiment, the invention relates to an isolated polypeptide with polysaccharide oxidase activity, comprising a sequence having an amino acid identity of at least 20% with a reference polypeptide sequence SEQ ID No. 1 (derived from Podospora anserina) or SEQ ID No. 2 (derived from Aspergillus aculeatus), using a BLAST-P comparison method, said BLAST-P comparison method giving an e-value of 1e⁻¹⁸ or less.

[0147] In particular, the invention relates to an isolated polypeptide with polysaccharide oxidase activity, as defined above, characterized in that it comprises a sequence having an amino acid identity of at least 40% with a reference polypeptide sequence SEQ ID No. 1 or SEQ ID No. 2, said BLAST-P comparison method giving an e-value of 1e⁻¹⁸ or less.

[0148] For example, a polypeptide with polysaccharide oxidase activity according to the invention may be characterized in that it comprises a sequence having an amino acid identity of at least 45% with a reference polypeptide sequence SEQ ID No. 1 or SEQ ID No. 2, said BLAST-P comparison method giving an e-value of 1e⁻¹⁸ or less.

[0149] In particular, the invention relates to an isolated polypeptide with polysaccharide oxidase activity, as defined above, characterized in that it comprises a sequence having an amino acid identity of at least 60% with a reference polypeptide sequence SEQ ID No. 1 or SEQ ID No. 2, said BLAST-P comparison method giving an e-value of 1e⁻¹⁸ or less.

[0150] In particular, the invention relates to an isolated polypeptide with polysaccharide oxidase activity, as defined above, characterized in that it comprises a sequence having an amino acid identity of at least 80% with a reference polypeptide sequence SEQ ID No. 1 or SEQ ID No. 2, said BLAST-P comparison method giving an e-value of 1e⁻¹⁸ or less.

[0151] In particular, the invention relates to an isolated polypeptide with polysaccharide oxidase activity, as defined above, characterized in that it comprises a sequence having an amino acid identity of at least 90% with a reference polypeptide sequence SEQ ID No. 1 or SEQ ID No. 2, said BLAST-P comparison method giving an e-value of 1e⁻¹⁸ or less.

[0152] According to certain embodiments, the invention relates to one of said isolated polypeptides with polysaccharide oxidase activity, as defined above, characterized in that it comprises a reference polypeptide sequence having an amino acid identity of at least 20% with a sequence selected from SEQ ID No. 5 to SEQ ID No. 383, which includes SEQ ID No. 7 to 382 and SEQ ID No. 383.

[0153] According to certain embodiments, the invention relates to one of said isolated polypeptides with polysaccharide oxidase activity, as defined above, characterized in that it comprises a reference polypeptide sequence having an amino acid identity of at least 80% with a sequence selected from SEQ ID No. 5 to SEQ ID No. 383, which includes SEQ ID No. 7 to 382 and SEQ ID No. 383.

[0154] According to certain embodiments, the invention relates to one of said isolated polypeptides with polysaccharide oxidase activity, as defined above, characterized in that it comprises a reference polypeptide sequence having an amino acid identity of at least 90% with a sequence selected from SEQ ID No. 5 to SEQ ID No. 383, which includes SEQ ID No. 7 to 382 and SEQ ID No. 383.

[0155] For example, the invention relates to an isolated polypeptide with polysaccharide oxidase activity, as defined above, characterized in that it comprises a reference polypeptide sequence selected from SEQ ID No. 5 to SEQ ID No. 382 and SEQ ID No. 383.

[0156] According to a particular embodiment, the invention relates to an isolated polypeptide with polysaccharide oxidase activity, as defined above, characterized in that it comprises a sequence having an amino acid identity of at least 20% with a reference polypeptide sequence SEQ ID No. 5 or SEQ ID No. 6, said BLAST-P comparison method giving an e-value of 1e⁻¹⁸ or less.

[0157] According to a particular embodiment, the invention relates to an isolated polypeptide with polysaccharide oxidase activity, as defined above, characterized in that it comprises a sequence having an amino acid identity of at least 40% with a reference polypeptide sequence SEQ ID No. 5 or SEQ ID No. 6, said BLAST-P comparison method giving an e-value of 1e⁻¹⁸ or less.

[0158] For example, a polypeptide with polysaccharide oxidase activity according to the invention may be characterized in that it comprises a sequence having an amino acid identity of at least 45% with a reference polypeptide sequence SEQ ID No. 5 or SEQ ID No. 6, said BLAST-P comparison method giving an e-value of 1e⁻¹⁸ or less.

[0159] According to a particular embodiment, the invention relates to an isolated polypeptide with polysaccharide oxidase activity, as defined above, characterized in that it comprises a sequence having an amino acid identity of at least 60% with a reference polypeptide sequence SEQ ID No. 5 or SEQ ID No. 6, said BLAST-P comparison method giving an e-value of 1e⁻¹⁸ or less.

[0160] According to a particular embodiment, the invention relates to an isolated polypeptide with polysaccharide oxidase activity, as defined above, characterized in that it comprises a sequence having an amino acid identity of at least 80% with a reference polypeptide sequence SEQ ID No. 5 or SEQ ID No. 6, said BLAST-P comparison method giving an e-value of 1e⁻¹⁸ or less.

[0161] According to a particular embodiment, the invention relates to an isolated polypeptide with polysaccharide oxidase activity, as defined above, characterized in that it comprises a sequence having an amino acid identity of at least 90% with a reference polypeptide sequence SEQ ID No. 5 or SEQ ID No. 6, said BLAST-P comparison method giving an e-value of 1e⁻¹⁸ or less.

[0162] According to an alternative embodiment, the invention relates to a composition with polysaccharide oxidase activity, characterized in that it comprises a polypeptide with polysaccharide oxidase activity as defined above.

[0163] In particular, the invention relates to a composition with polysaccharide oxidase activity as defined above, characterized in that it further comprises at least one polypeptide with polysaccharide degradase activity selected from: a cellulase, a hemicellulase, a ligninase and a carbohydrate oxidase.

[0164] Nonexhaustively, said composition with polysaccharide oxidase activity may be characterized in that it is obtainable from one or more organisms selected from: Agaricus bisporus, Alternaria alternata, Amanita thiersii, Armillaria ostoyae, Armillaria solidipes, Ascochyta rabiei, Aspergillus arachidicola, Aspergillus bombycis, Aspergillus brasiliensis, Aspergillus campestris, Aspergillus candidus, Aspergillus carbonarius, Aspergillus clavatus, Aspergillus cristatus, Aspergillus fischeri, Aspergillus flavus, Aspergillus fumigatus, Aspergillus glaucus, Aspergillus kawachii, Aspergillus lentulus, Aspergillus luchuensis, Aspergillus nidulans, Aspergillus niger, Aspergillus nomius, Aspergillus novofumigatus, Aspergillus ochraceoroseus, Aspergillus oryzae, Aspergillus parasiticus, Aspergillus ruber, Aspergillus steynii, Aspergillus sydowii, Aspergillus taichungensis, Aspergillus terreus, Aspergillus thermomutatus, Aspergillus tubingensis, Aspergillus turcosus, Aspergillus udagawae, Aspergillus versicolor, Aspergillus wentii, Aureobasidium melanogenum, Aureobasidium namibiae, Aureobasidium pullulans, Aureobasidium subglaciale, Auricularia subglabra, Bipolaris maydis, Bipolaris oryzae, Bipolaris sorokiniana, Bipolaris victoriae, Bipolaris zeicola, Botryobasidium botryosum, Botrytis cinerea, Ceratocystis fimbriata, Ceratocystis platani, Cercospora berteroae, Cercospora beticola, Cercospora zeina, Chaetomium globosum, Chaetomium globosum, Clohesyomyces aquaticus, Colletotrichum chlorophyti, Colletotrichum fioriniae, Colletotrichum gloeosporioides, Colletotrichum graminicola, Colletotrichum higginsianum, Colletotrichum incanum, Colletotrichum nymphaeae, Colletotrichum orbiculare, Colletotrichum orchidophilum, Colletotrichum salicis, Colletotrichum simmondsii, Colletotrichum sublineola, Colletotrichum tofieldiae, Coniella lustricola, Coniochaeta ligniaria, Corynespora cassiicola, Cylindrobasidium torrendii, Daldinia sp., Diaporthe ampelina, Diaporthe helianthi, Diplocarpon rosae, Diplodia corticola, Diplodia seriata, Dothistroma septosporum, Elsinoe, Elsinoe australis, Emergomyces pasteuriana, Epicoccum nigrum, Eutypa lata, Exidia glandulosa, Fungi, Fusarium avenaceum, Fusarium culmorum, Fusarium fujikuroi, Fusarium graminearum, Fusarium langsethiae, Fusarium mangiferae, Fusarium nygamai, Fusarium oxysporum, Fusarium poae, Fusarium proliferatum, Fusarium pseudograminearum, Fusarium venenatum, Fusarium verticillioides, Gaeumannomyces tritici, Glarea lozoyensis, Glonium stellatum, Grosmannia clavigera, Helicocarpus griseus, Heterobasidion irregulare, Hirsutella minnesotensis, Histoplasma capsulatum, Hortaea werneckii, Hydnomerulius pinastri, Hypoxylon sp., Jaapia argillacea, Leptosphaeria maculans, Leucoagaricus, Lomentospora prolificans, Magnaporthe oryzae, Magnaporthiopsis poae, Marssonina brunnea, Marssonina coronariae, Meliniomyces bicolor, Meliniomyces variabilis, Microdochium bolleyi, Moniliophthora roreri, Mycosphaerella eumusae, Neofusicoccum parvum, Neonectria ditissima, Ophiocordyceps australis, Ophiocordyceps camponotirufipedis, Ophiocordyceps unilateralis, Panaeolus cyanescens, Paraphaeosphaeria sporulosa, Parastagonospora nodorum, Penicilliopsis zonata, Penicillium arizonense, Penicillium brasilianum, Penicillium camemberti, Penicillium coprophilum, Penicillium digitatum, Penicillium expansum, Penicillium flavigenum, Penicillium freii, Penicillium griseofulvum, Penicillium italicum, Penicillium nordicum, Penicillium oxalicum, Penicillium polonicum, Penicillium roqueforti, Penicillium rubens, Penicillium solitum, Penicillium subrubescens, Penicillium vulpinum, Peniophora, Pestalotiopsis fici, Phellinus noxius, Phialocephala, scopiformis, Phialocephala, subalpina, Pleurotus ostreatus, Plicaturopsis crispa, Pseudogymnoascus verrucosus, Pseudomassariella vexata, Punctularia strigosozonata, Pyrenochaeta, Pyrenophora teres, Pyrenophora triticirepentis, Rhizoctonia solani, Rhynchosporium commune, Rosellinia necatrix, Rutstroaemia, Scedosporium apiospermum, Schizophyllum commune, Sclerotinia borealis, Sclerotinia sclerotiorum, Serpula lacrymans, Setosphaeria turcica, Sordaria macrospora, Sphaerulina musiva, Sporothrix brasiliensis, Sporothrix insectorum, Sporothrix schenckii, Stachybotrys chartarum, Stachybotrys chlorohalonata, Stagonospora, Stemphylium lycopersici, Thermothelomyces thermophila, Thielavia terrestris, Thielaviopsis punctulata, Valsa mali, Verruconis gallopava, Verticillium alfalfae, Verticillium dahliae, Verticillium longisporum.

[0165] In particular, said composition with polysaccharide oxidase activity may be characterized in that it is obtainable from one or more organisms of the type bacterium, fungus (for example filamentous fungi) or yeast, selected from the genera: Escherichia, Lactococcus, Bacillus, Streptomyces, Pseudomonas, Phanerochaete, Achlya, Acremonium, Aspergillus, Cephalosporium, Chrysosporium, Cochliobolus, Endothia, Fusarium, Gliocladium, Humicola, Hypocrea, Myceliophthora, Mucor, Neurospora, Penicillium, Pyricularia, Thielavia, Tolypocladium, Trichoderma, Podospora, Pycnoporus, Fusarium, Thermonospora; quite particularly Aspergillus or Trichoderma or Podospora; preferably Aspergillus or Podospora.

[0166] In particular, said composition with polysaccharide oxidase activity may be characterized in that it is obtainable from one or more organisms of the fungus or yeast type, selected from the genera: Achlya, Acremonium, Aspergillus, Cephalosporium, Chrysosporium, Cochliobolus, Endothia, Fusarium, Gliocladium, Humicola, Hypocrea, Myceliophthora, Mucor, Neurospora, Penicillium, Pyricularia, Thielavia, Tolypocladium, Trichoderma, Podospora, Pycnoporus, Fusarium, Thermonospora; quite particularly Aspergillus or Trichoderma or Podospora; preferably Aspergillus or Podospora.

[0167] According to one embodiment, said composition with polysaccharide oxidase activity may be characterized in that it is obtainable from Aspergillus japonicus.

[0168] A polypeptide with polysaccharide oxidase activity according to the invention may also be obtained recombinantly.

[0169] Thus, a composition with polysaccharide oxidase activity according to the invention may be characterized in that said polypeptide with polysaccharide oxidase activity is obtained recombinantly.

[0170] According to certain embodiments, a composition with polysaccharide oxidase activity according to the invention comprises only one polypeptide (or “enzyme”) with polysaccharide oxidase activity according to the invention, or a polypeptide having a sequence having an amino acid identity of at least 20% with a reference polypeptide sequence SEQ ID No. 1 (derived from Podospora anserina) or SEQ ID No. 2 (derived from Aspergillus aculeatus), using a BLAST-P comparison method, said BLAST-P comparison method giving an e-value of 1e⁻¹⁸ or less.

[0171] According to certain embodiments, a composition with polysaccharide oxidase activity according to the invention comprises a plurality of polypeptides with polysaccharide oxidase activity according to the invention, or more than one polypeptide having a sequence having an amino acid identity of at least 20% with a reference polypeptide sequence SEQ ID No. 1 (derived from Podospora anserina) or SEQ ID No. 2 (derived from Aspergillus aculeatus), using a BLAST-P comparison method, said BLAST-P comparison method giving an e-value of 1e⁻¹⁸ or less.

[0172] According to certain of these embodiments, a composition with polysaccharide oxidase activity according to the invention comprises at least 2, 3, 4, 5, 6, 7, 8, 9 or 10 polypeptides with polysaccharide oxidase activity according to the invention.

[0173] According to certain embodiments, a composition with polysaccharide oxidase activity according to the invention further comprises at least one other polypeptide with polysaccharide oxidase activity; in particular selected from the lytic polysaccharide monooxygenases, which includes the polypeptides belonging to the LPMO groups AA9, AA10, AA11, AA13 and AA14.

[0174] According to certain embodiments, a composition with polysaccharide oxidase activity according to the invention may be used as a composition for degrading a polysaccharide substrate, such as lignocellulosic biomasses.

[0175] According to certain other embodiments, a composition with polysaccharide oxidase activity according to the invention may be used as an auxiliary composition in combination with one or more polypeptides with polysaccharide degradase activity.

[0176] Thus, according to an alternative embodiment, a polypeptide with polysaccharide oxidase activity according to the invention may be used in the form of a kit.

[0177] Advantageously, a kit of this kind may comprise a polypeptide with polysaccharide oxidase activity or a composition with polysaccharide oxidase activity according to the invention; and in addition a polypeptide with polysaccharide degradase activity or a composition comprising said polypeptide with polysaccharide degradase activity.

[0178] Thus, the invention also relates to a kit comprising at least:
[0179] a first part comprising a polypeptide with polysaccharide oxidase activity according to the invention, or a composition comprising said polypeptide with polysaccharide oxidase activity;
[0180] a second part comprising a polypeptide with polysaccharide degradase activity selected from a cellulase, a hemicellulase, a ligninase and a carbohydrate oxidase, or a composition comprising said polypeptide with polysaccharide degradase activity.

[0181] Such kits may correspond in particular to kits for:
[0182] obtaining a sugar starting from a polysaccharide substrate;
[0183] preparing a fermentation product from a polysaccharide substrate;
[0184] producing alcohol starting from a lignocellulosic substrate;
[0185] preparing a cellulosic substrate for producing cellulose fibers;
[0186] defibrillating a cellulosic substrate;
[0187] producing cellulose fibers.

[0188] According to another embodiment, the invention relates to a host able to express recombinantly a polypeptide with polysaccharide oxidase activity according to the invention. Said host may in particular be a prokaryotic or eukaryotic cell. According to a particular embodiment, said host is a yeast or a bacterium or a fungus, for example a filamentous fungus.

[0189] According to the invention, a “host” may in particular be a yeast selected from a group comprising: Saccharomyces, Kluyveromyces, Candida, Pichia, Schizosaccharomyces, Hansenula, Kloeckera, Schwanniomyces, and Yarrowia.

[0190] In particular, the yeasts may be selected from: S. cerevisiae, S. bulderi, S. barnetti, S. exiguus, S. uvarum, S. diastaticus, K. lactis, K. marxianus, or K. fragilis.

[0191] According to certain embodiments, the yeast is selected from: Saccharomyces cerevisiae, Schizzosaccharomyces pombe, Issatchenkia orientalis, Candida albicans, Candida mexicana, Pichia pastoris, Pichia mississippiensis, Pichia mexicana, Pichia stipitis, Pichia farinosa, Clavispora opuntiae, Clavispora lusitaniae, Yarrowia lipolytica, Hansenula polymorpha, Phaffia rhodozyma, Candida utilis, Arxula adeninivorans, Debaryomyces hansenii, Debaryomyces polymorphus, Schizosaccharomyces pombe, Hansenula polymorpha, and Schwanniomyces occidentalis.

[0192] According to other embodiments, a “host” may in particular be a bacterium selected from a group comprising: Escherichia, Lactococcus, Bacillus, Streptomyces, Pseudomonas.

[0193] According to other embodiments, a “host” may in particular be a fungus selected from a group comprising: Aspergillus, Trichoderma, Podospora, Myceliophthora, Chrysosporium, Neurospora, Fusarium, Phanerochaete, Penicillium.

[0194] According to a preferred embodiment, said host is a yeast.

[0195] The invention also relates to an isolated nucleic acid coding for a polypeptide with polysaccharide oxidase activity according to the invention.

[0196] Thus, a nucleic acid allowing expression of a polypeptide with polysaccharide oxidase activity according to the invention may be introduced into the genome of a host (i.e. yeast) of interest, or else introduced as a non-integrated vector according to techniques of genetic engineering known in this field.

[0197] The invention also relates to a method for producing a polypeptide with polysaccharide oxidase activity; comprising a step of culturing a host capable of expressing a polypeptide with polysaccharide oxidase activity according to the invention.

[0198] Thus, the invention relates to vectors including a nucleic acid coding for a polypeptide with polysaccharide oxidase activity according to the invention. In particular, said vectors (i.e. plasmids or YAC) are expression vectors capable of directing the expression of a given gene, and associated with an operon.

[0199] The invention therefore also relates to a method for producing a polypeptide with polysaccharide oxidase activity; consisting of:
[0200] (a) culturing a host capable of producing a polypeptide with polysaccharide oxidase activity, characterized in that it comprises a sequence having an amino acid identity of at least 20% with a reference polypeptide sequence SEQ ID No. 1 (derived from Podospora anserina) or SEQ ID No. 2 (derived from Aspergillus aculeatus), using a BLAST-P comparison method, said BLAST-P comparison method giving an e-value of 1e⁻¹⁸ or less; and
[0201] (b) recovering said polypeptide from said host.
   Methods of Obtaining Sugars Starting from Polysaccharide Substrates

[0202] The polypeptides with polysaccharide oxidase activity according to the invention may be used both in methods for obtaining a sugar starting from a polysaccharide substrate, methods of fermentation and of production of alcohol starting from a lignocellulosic substrate.

[0203] Thus, methods for producing ethanol starting from polysaccharide substrates, such as lignocellulosic biomasses, are described in Margeot et al. (“New improvements for lignocellulosic ethanol”; Current Opinion in Biotechnology; 20:372-380, 2009). Thus, a complete method for ethanol production starting from lignocellulosic biomass generally comprises four main steps:
[0204] 1. pretreatment of the polysaccharide substrate (i.e. lignocellulosic biomass); for breaking the structure of the lignocellulosic wall, by liquefying certain components and by reducing the crystallinity of the cellulose.

[0205] There are physical (mechanical or hydrothermal) pretreatments for reducing the particle size and dissolving a portion of the hemicelluloses, chemical pretreatments that use acids, bases or oxidizing agents for solubilizing the hemicelluloses and removing the lignin, and biological pretreatments that use fungal species capable of degrading lignin. Certain pretreatments combine physical and chemical methods, for example such as steam explosion in the presence of dilute acid or cold explosion with ammonia.
[0206] 2. enzymatic hydrolysis of said substrate, consisting of depolymerizing the cellulose and the remaining hemicelluloses into monomers, using specific enzymes.

[0207] These enzymes are secreted by a variety of cellulolytic, aerobic or anaerobic, mesophilic or thermophilic organisms, belonging in particular to the genera Clostridium, Thermomonospora, Cellulomonas, Bacteroides or Streptomyces for the bacteria, and Phanerochaete, Trichoderma, Aspergillus or Penicillium for the filamentous fungi.
[0208] 3. fermentation of said substrate to obtain said ethanol starting from sugars (i.e. pentoses and hexoses) resulting from the hydrolysis step.

[0209] This fermentation step is in particular carried out with microorganisms such as the yeast Saccharomyces cerevisiae, which is the microorganism most used in industry owing to its high yields and low sensitivity to inhibitors. However, it is not capable naturally of utilizing the pentoses produced during enzymatic hydrolysis. Thus, in order to improve yields, modified strains capable of fermenting sugars such as xylose or arabinose have been developed.
[0210] 4. purification of said ethanol, generally with a view to using it as motor fuel, which must meet a certain number of requirements. This purification generally consists of distillation, rectification and dehydration.

[0211] According to one embodiment, these steps may be carried out separately, or else simultaneously. For example, these various steps may be carried out separately, as is the case in a method designated SHF (“Separate Hydrolysis and Fermentation”) in which the enzymes and the yeasts may each be used in their optimal conditions. It is also possible to perform these steps simultaneously, by a method called SSCF (“Simultaneous Saccharification and Co-Fermentation”). Finally, the concept of “Consolidated Bioprocessing” (CBP) proposes carrying out the production of cellulases, enzymatic hydrolysis and fermentation using a single microorganism.

[0212] To make lignocellulosic bioethanol cost-effective, it is generally necessary to optimize each of the steps in its production. It is in particular essential to select an appropriate pretreatment suitable for the type of biomass being treated, in order to maximize its effect, while limiting the formation of inhibitors and reducing costs and energy consumption. Enzymatic hydrolysis is often regarded as the most critical step in terms of yields and cost.

[0213] The polypeptides with polysaccharide oxidase activity according to the invention are particularly advantageous in the context of a step of hydrolysis of polysaccharide substrates.

[0214] Thus, according to one embodiment, the invention relates to a method of obtaining a sugar starting from a polysaccharide substrate, comprising at least one step of contacting said substrate with a polypeptide with polysaccharide oxidase activity, comprising a sequence having an amino acid identity of at least 20% with a reference polypeptide sequence SEQ ID No. 1 (derived from Podospora anserina) or SEQ ID No. 2 (derived from Aspergillus aculeatus), using a BLAST-P comparison method, said BLAST-P comparison method giving an e-value of 1e⁻¹⁸ or less, or a composition with polysaccharide oxidase activity comprising said polypeptide.

[0215] In particular, the invention relates to a method of obtaining a sugar starting from a polysaccharide substrate, comprising at least one step of contacting said substrate with a polypeptide with polysaccharide oxidase activity, comprising a sequence having an amino acid identity of at least 20% with a reference polypeptide sequence SEQ ID No. 5 (derived from Podospora anserina) or SEQ ID No. 6 (derived from Aspergillus aculeatus), using a BLAST-P comparison method, said BLAST-P comparison method giving an e-value of 1e⁻¹⁸ or less, or a composition with polysaccharide oxidase activity comprising said polypeptide.

[0216] Thus, the invention relates to a method of obtaining a sugar starting from a polysaccharide substrate, comprising the steps of:
[0217] a) providing a polysaccharide substrate;
[0218] b) contacting said polysaccharide substrate with a polypeptide with polysaccharide oxidase activity, comprising a sequence having an amino acid identity of at least 20% with a reference polypeptide sequence SEQ ID No. 1 (derived from Podospora anserina) or SEQ ID No. 2 (derived from Aspergillus aculeatus), using a BLAST-P comparison method, said BLAST-P comparison method giving an e-value of 1e⁻¹⁸ or less, or a composition with polysaccharide oxidase activity comprising said polypeptide;
[0219] c) collecting said sugar obtained at the end of step b).

[0220] In particular, the invention relates to a method of obtaining a sugar starting from a polysaccharide substrate, comprising the steps of:
[0221] a) providing a polysaccharide substrate;
[0222] b) contacting said polysaccharide substrate with a polypeptide with polysaccharide oxidase activity, comprising a sequence having an amino acid identity of at least 20% with a reference polypeptide sequence SEQ ID No. 5 (derived from Podospora anserina) or SEQ ID No. 6 (derived from Aspergillus aculeatus), using a BLAST-P comparison method, said BLAST-P comparison method giving an e-value of 1e⁻¹⁸ or less, or a composition with polysaccharide oxidase activity comprising said polypeptide;
[0223] c) collecting said sugar obtained at the end of step b).

[0224] In particular, the invention relates to a method of obtaining a sugar as defined above, characterized in that said substrate is a lignocellulosic substrate, and quite particularly a lignocellulosic biomass.

[0225] According to another embodiment, the invention relates to a method for preparing a fermentation product starting from a polysaccharide substrate, characterized in that it comprises obtaining a sugar by a method as defined above, and fermentation of said sugar so as to obtain a fermentation product.

[0226] Thus, the invention relates method for preparing a fermentation product starting from a polysaccharide substrate, characterized in that it comprises the following steps:
[0227] a) contacting said substrate with a polypeptide with polysaccharide oxidase activity, comprising a sequence having an amino acid identity of at least 20% with a reference polypeptide sequence SEQ ID No. 1 (derived from Podospora anserina) or SEQ ID No. 2 (derived from Aspergillus aculeatus), using a BLAST-P comparison method, said BLAST-P comparison method giving an e-value of 1e⁻¹⁸ or less, or a composition with polysaccharide oxidase activity comprising said polypeptide, so as to obtain a sugar;
[0228] b) fermenting said sugar so as to obtain a fermentation product.

[0229] In particular, the invention relates to a method for preparing a fermentation product starting from a polysaccharide substrate, characterized in that it comprises the following steps:
[0230] a) contacting said substrate with a polypeptide with polysaccharide oxidase activity, comprising a sequence having an amino acid identity of at least 20% with a reference polypeptide sequence SEQ ID No. 5 (derived from Podospora anserina) or SEQ ID No. 6 (derived from Aspergillus aculeatus), using a BLAST-P comparison method, said BLAST-P comparison method giving an e-value of 1e⁻¹⁸ or less, or a composition with polysaccharide oxidase activity comprising said polypeptide, so as to obtain a sugar;
[0231] b) fermenting said sugar so as to obtain a fermentation product.

[0232] According to another embodiment, the invention relates to a method of producing alcohol starting from a lignocellulosic substrate, characterized in that it comprises obtaining a sugar by a method as defined above, and alcoholic fermentation of said sugar by an alcohol-producing microorganism.

[0233] The fermentation product is preferably butanol, ethanol, isopropanol or a mixture thereof.

[0234] Thus, in the context of ethanolic fermentation, the product of alcoholic fermentation considered is ethanol.

[0235] Thus, preferably, a method of fermentation and/or production of alcohol according to the invention is a method of production of butanol, ethanol, isopropanol or a mixture thereof.

[0236] Thus, the invention relates to a method of producing alcohol starting from a lignocellulosic substrate, characterized in that it comprises the following steps:
[0237] a) contacting said substrate with a polypeptide with polysaccharide oxidase activity, comprising a sequence having an amino acid identity of at least 20% with a reference polypeptide sequence SEQ ID No. 1 (derived from Podospora anserina) or SEQ ID No. 2 (derived from Aspergillus aculeatus), using a BLAST-P comparison method, said BLAST-P comparison method giving an e-value of 1e⁻¹⁸ or less, or a composition with polysaccharide oxidase activity comprising said polypeptide, so as to obtain a sugar;
[0238] b) fermenting said sugar by an alcohol-producing microorganism so as to produce said alcohol.

[0239] In particular, the invention relates to a method of producing alcohol starting from a lignocellulosic substrate, characterized in that it comprises the following steps:
[0240] a) contacting said substrate with a polypeptide with polysaccharide oxidase activity, comprising a sequence having an amino acid identity of at least 20% with a reference polypeptide sequence SEQ ID No. 5 (derived from Podospora anserina) or SEQ ID No. 6 (derived from Aspergillus aculeatus), using a BLAST-P comparison method, said BLAST-P comparison method giving an e-value of 1e⁻¹⁸ or less, or a composition with polysaccharide oxidase activity comprising said polypeptide, so as to obtain a sugar;
[0241] b) fermenting said sugar by an alcohol-producing microorganism so as to produce said alcohol.

### Cellulose Fibers, Methods for Preparing Substrates and for Defibrillation

[0242] Various forms of cellulose were identified with a size of the order of a nanometer, designated with the general name “nanocelluloses”. The properties, especially mechanical, of cellulose fibers, including these nanocelluloses, their capacity to form films and their viscosity, also make them of major interest in many fields of industry. Several strategies for pretreating cellulose fibers have thus been developed in order to reduce the energy consumption required for their mechanical delamination.

[0243] The methods defined hereunder relate to obtaining cellulose fibers starting from a cellulosic substrate. They involve using a polypeptide with polysaccharide oxidase activity according to the invention.

[0244] According to one embodiment, the invention relates to a method for preparing a cellulosic substrate for producing cellulose fibers, said method comprising at least the following steps consisting of:
[0245] a) providing a cellulosic substrate able to form cellulose fibers;
[0246] b) in the presence of an electron donor, contacting said substrate with at least one polypeptide with polysaccharide oxidase activity, in conditions suitable for ensuring oxidative cleavage of said cellulose fibers; characterized in said that polypeptide with polysaccharide oxidase activity has an amino acid identity of at least 20% with a reference polypeptide sequence SEQ ID No. 1 or SEQ ID No. 2, using a BLAST-P comparison method, said BLAST-P comparison method giving an e-value of 1e⁻¹⁸ or less.

[0247] According to a particular embodiment, the invention relates to a method for preparing a cellulosic substrate for producing cellulose fibers, said method comprising at least the following steps consisting of:
[0248] a) providing a cellulosic substrate able to form cellulose fibers;
[0249] b) in the presence of an electron donor, contacting said substrate with at least one polypeptide with polysaccharide oxidase activity, in conditions suitable for ensuring oxidative cleavage of said cellulose fibers; characterized in that said polypeptide with polysaccharide oxidase activity has an amino acid identity of at least 20% with a reference polypeptide sequence SEQ ID No. 5 or SEQ ID No. 6, using a BLAST-P comparison method, said BLAST-P comparison method giving an e-value of 1e⁻¹⁸ or less.

[0250] According to one embodiment, the invention relates to a method of defibrillating a cellulosic substrate, said method comprising at least the following steps consisting of:
[0251] a) providing a cellulosic substrate able to form cellulose fibers, which had been brought into contact beforehand with an electron donor and a polypeptide with polysaccharide oxidase activity, in conditions suitable for ensuring oxidative cleavage of said cellulose fibers in the presence of an electron donor; and
[0252] b) treating said cellulosic substrate mechanically, in order to defibrillate said substrate, characterized in that said polypeptide with polysaccharide oxidase activity has an amino acid identity of at least 20% with a reference polypeptide sequence SEQ ID No. 1 or SEQ ID No. 2, using a BLAST-P comparison method, said BLAST-P comparison method giving an e-value of 1e⁻¹⁸ or less.

[0253] According to a particular embodiment, the invention relates to a method of defibrillating a cellulosic substrate, said method comprising at least the following steps consisting of:
[0254] a) providing a cellulosic substrate able to form cellulose fibers, which had been brought into contact beforehand with an electron donor and a polypeptide with polysaccharide oxidase activity, in conditions suitable for ensuring oxidative cleavage of said cellulose fibers in the presence of an electron donor; and
[0255] b) treating said cellulosic substrate mechanically, in order to defibrillate said substrate, characterized in that said polypeptide with polysaccharide oxidase activity has an amino acid identity of at least 20% with a reference polypeptide sequence SEQ ID No. 5 or SEQ ID No. 6, using a BLAST-P comparison method, said BLAST-P comparison method giving an e-value of 1e⁻¹⁸ or less.

[0256] According to one embodiment, the invention relates to a method of producing cellulose fibers, said method comprising at least the following steps consisting of:
[0257] a) providing a cellulosic substrate able to form cellulose fibers;
[0258] b) in the presence of an electron donor, contacting said cellulosic substrate with at least one polypeptide with polysaccharide oxidase activity in conditions suitable for ensuring oxidative cleavage of said cellulose fibers;
[0259] c) treating said cellulosic substrate mechanically, in order to produce said cellulose fibers starting from said cellulosic substrate, characterized in said that polypeptide with polysaccharide oxidase activity has an amino acid identity of at least 20% with a reference polypeptide sequence SEQ ID No. 1 or SEQ ID No. 2, using a BLAST-P comparison method, said BLAST-P comparison method giving an e-value of 1e⁻¹⁸ or less.

[0260] According to a particular embodiment, the invention relates to a method of producing cellulose fibers, said method comprising at least the following steps consisting of:
[0261] a) providing a cellulosic substrate able to form cellulose fibers;
[0262] b) in the presence of an electron donor, contacting said cellulosic substrate with at least one polypeptide with polysaccharide oxidase activity in conditions suitable for ensuring oxidative cleavage of said cellulose fibers;
[0263] c) treating said cellulosic substrate mechanically, in order to produce said cellulose fibers starting from said cellulosic substrate, characterized in that said polypeptide with polysaccharide oxidase activity has an amino acid identity of at least 20% with a reference polypeptide sequence SEQ ID No. 5 or SEQ ID No. 6, using a BLAST-P comparison method, said BLAST-P comparison method giving an e-value of 1e⁻¹⁸ or less.

[0264] Said polypeptide with polysaccharide oxidase activity according to the invention is mixed with the cellulosic substrate, so as to allow contacting between said polypeptide and the cellulose fibers.

[0265] The step of enzymatic treatment is preferably carried out with gentle stirring, so as to ensure good dispersion of the enzymes within the fibers. This step of enzymatic treatment is for example carried out for a time ranging from 24 h to 72 h (preferably 48 h).

[0266] Preferably, the step of enzymatic treatment is in carried out at a temperature from 30 to 50° C., particular from 30 to 45° C.

[0267] The pH of the reaction conditions of the enzyme in contact with the cellulosic substrate is generally between 3 and 7, which includes between 4 and 7, and in particular between 4 and 6.

[0268] According to the invention, said polypeptide may be added to the cellulosic substrate at an enzyme/cellulose ratio from 1:1000 to 1:50, in particular from 1:500 to 1:50 or from 1:100 to 1:50 or else from 1:1000 to 1:500, from 1:500 to 1:100.

[0269] Preferably, said polypeptide is used at a concentration from 0.001 to 10 g/L, in particular from 0.1 to 5 g/L, and more preferably from 0.5 to 5 g/L.

[0270] According to a particular embodiment, the cellulosic substrate is submitted to at least two (or even only two) successive steps of enzymatic treatment (in series, advantageously separated by a rinsing step).

[0271] The polypeptide or polypeptides used in each of these steps of enzymatic treatment are identical or different; the conditions (in particular the enzyme/substrate ratio) are identical or different between these successive steps.

[0272] Non-exclusively, tests of cleavage of cellulose by a polypeptide according to the invention may be carried out according to the following protocol:

[0273] For example, a cleavage test may be carried out in a volume of 300 μl of liquid containing 4.4 μM of LPMO enzyme and 1 mM of ascorbate and 0.1% (weight/volume) of cellulose powder swollen with phosphoric acid (PASC, phosphoric acid-swollen cellulose—prepared as described in Wood TM, Methods Enzym 1988, 160: 19-25) in 50 mM of a sodium acetate buffer at pH 4.8 or 5 μM of cello-oligosaccharides (Megazyme, Wicklow, Ireland) in 10 mM of sodium acetate buffer at pH 4.8.

[0274] The enzymatic reaction may be carried out in a 2-ml tube incubated in a thermomixer (Eppendorf, Montesson, France) at 50° C. and 580 rpm (revolutions per minute).

[0275] The fibers are brought into contact with the enzymes (at a concentration between 1 and 5 g/L and at enzyme/cellulose ratios of 1:50, 1:100, 1:500 and 1:1000) and the ascorbate (2 mM) and then stirred gently for 48 hours at 40° C.

[0276] After incubation for 16 h, the sample is heated to 100° C. for 10 minutes to stop the enzymatic reaction, and then centrifuged at 16 000 revolutions per minute (rpm) for 15 minutes at 4° C. in order to separate the solution fraction from the remaining insoluble fraction.

[0277] The treated fibers are then submitted to mechanical action with a homogenizing-dispersing machine (Ultra-Turrax, power 500 W, maximum speed for 3 minutes), followed by ultrasonic treatment for 3 minutes.

[0278] According to one embodiment, said methods are characterized in that the cellulose fibers obtained as a result of the procedure are cellulose nanofibrils.

[0279] According to one embodiment, said methods are characterized in that the electron donor is selected from ascorbate, gallate, catechol, reduced glutathione, lignin fragments and fungal carbohydrate dehydrogenases; and preferably ascorbate.

[0280] According to one embodiment, said methods are characterized in that the cellulosic substrate is obtained from wood, a cellulose-rich fibrous plant, beet, citrus fruits, annual straw plants, marine animals, algae, fungi or bacteria.

[0281] According to one embodiment, said methods are characterized in that the cellulosic substrate is selected from the chemical papermaking pulps, preferably chemical wood pulps, more preferably at least one of the following papermaking pulps: bleached pulps, semibleached pulps, unbleached pulps, bisulfite pulps, sulfate pulps, sodium hydroxide pulps, kraft pulps.

[0282] According to one embodiment, said methods are characterized in that the cellulosic substrate is a papermaking pulp derived from wood, annual plants or fiber plants.

[0283] According to one embodiment, said methods are characterized in that said at least one step of mechanical treatment comprises at least one of the following mechanical treatments:
[0284] a homogenization treatment,
[0285] a microfluidization treatment,
[0286] an abrasion treatment, and/or
[0287] a cryogrinding treatment.

[0288] According to one embodiment, said methods are characterized in that, following said step of mechanical treatment, said method comprises a step of posttreatment selected from: acid treatment, enzymatic treatment, oxidation, acetylation, silylation, or else derivatization of chemical groups carried by said cellulose fibers.

[0289] According to another aspect, the invention relates to cellulose fibers resulting from a defibrillation process and/or a method of producing cellulose fibers as defined above.

[0290] Said cellulose fibers may be characterized in that said cellulose fibers, preferably nanocellulose fibers, comprise glucose rings, at least one carbon atom of which is oxidized in position (s) C₁ and/or C₄, or also C₆.

[0291] According to a preferred embodiment, the cellulose fibers are cellulose nanofibrils.

### Step (s) of Mechanical Treatment(s)

[0292] The cellulosic substrate brought into contact with said enzyme is then submitted to at least one step of mechanical treatment that is intended to delaminate the cellulose fibers to obtain nanocelluloses.

[0293] Delamination (also called “fibrillation” or “defibrillation”) consists of separating, by a mechanical effect, the cellulose fibers within the cellulosic substrate, in particular for producing nanocelluloses.

[0294] As demonstrated, the oxidative cleavage of cellulose fibers, catalyzed by said at least one LPMO, facilitates delamination of these cellulose fibers during the step of mechanical treatment.

[0295] This step of mechanical delamination of the cellulose fibers may thus be carried out in conditions that are less harsh and therefore less costly in terms of energy.

[0296] The mechanical treatments with the aim of delaminating cellulose fibers are known by a person skilled in the art and may be employed in the method (s) of the invention.

[0297] In general, we may mention the low-level mechanical treatments with a homogenizing-dispersing machine (for example of the Ultra-Turrax type) and/or ultrasonic treatments.

[0298] We may for example also refer to the document of Lavoine N et al. (Carbohydrate Polymers, 2012, (92): 735-64), which describes in particular (pages 740 to 744) mechanical treatments for preparing microfibrillar cellulose (for example cellulose nanofibrils).

[0299] Typically, a mechanical treatment may be selected from mechanical treatments of homogenization, microfluidization, abrasion, or cryogrinding.

[0300] The homogenization treatment involves passing the pretreated cellulosic substrate, typically a cellulose pulp or a liquid suspension of cellulose, through a narrow space under high pressure (as described for example in patent U.S. Pat. No. 4,486,743).

[0301] This homogenization treatment is preferably carried out by means of a homogenizer of the Gaulin type. In such a device, the pretreated cellulosic substrate, typically in the form of a suspension of cellulose, is pumped at high pressure and distributed through a small-orifice automatic valve. A rapid succession of openings and closures of the valve subjects the fibers to a large pressure drop (generally of at least 20 MPa) and a high-speed shearing action followed by an impact of deceleration at high speed. Passage of the substrate through the orifice is repeated (generally from 8 to 10 times) until the cellulose suspension becomes stable. Cooling water is generally used in order to maintain a temperature of the product in a range from 70 to 80° C. during the homogenization treatment.

[0302] This homogenization treatment may also be carried out using a device of the microfluidizer type (see for example Sisqueira et al. Polymer 2010 2 (4): 728-65). In such a device, the cellulose suspension passes through a fine chamber typically of “z” shape (in which the size of the channel is generally between 200 and 400 μm) under high pressure (about 2070 bar). The high shear rate that is applied (generally greater than 10⁷·s⁻¹) makes it possible to obtain very fine nanofibrils. A variable number of passes (for example from 2 to 30, in particular from 10 to 30 or from 5 to 25, and in particular from 5 to 20) with chambers of different sizes may be used, to increase the degree of fibrillation.

[0303] Abrasion or milling treatment (see for example Iwamoto S et al., 2007 Applied Physics A89 (2): 461-66) is based on the use of a grinding device able to exert shearing forces supplied by millstones.

[0304] The pretreated cellulosic substrate, generally in the form of a cellulose pulp, is passed between a static millstone and a rotating millstone, typically rotating at a speed of the order of 1500 revolutions per minute (rpm). Several passes (generally between 2 and 5) may be necessary to obtain fibrils of nanometric size.

[0305] A device of the mixer type (for example as described in Unetani K et al., Biomacromolécules 2011, 12(2), pp. 348-53) may also be used for producing microfibrils starting from the pretreated cellulosic substrate, for example starting from a suspension of wood fibers.

[0306] The treatment of cryogrinding (or cryocrushing) (Dufresne et al., 1997, Journal of Applied Polymer Science, 64 (6): 1185-94) consists of grinding a suspension of pretreated cellulosic substrate, frozen beforehand with liquid nitrogen. The ice crystals formed inside the cells cause the cell membranes to explode and release wall fragments. These methods are generally employed for producing microcellulose fibrils from agricultural products, or from agricultural waste.

### Step (s) of Posttreatment of the Cellulosic Substrate

[0307] In certain embodiments, the process for defibrillation and/or manufacture of cellulose fibers comprises at least one step of posttreatment of the cellulosic substrate, carried out after said substrate has undergone mechanical treatment.

[0308] Generally, said at least one step of posttreatment aims to increase the degree of fibrillation of the celluloses (especially nanocelluloses) obtained and/or to endow said nanocelluloses with novel mechanical properties, depending on the applications envisaged.

[0309] Said at least one step of posttreatment may in particular be selected from an acid treatment, an enzymatic treatment, oxidation, acetylation, silylation, or else derivatization of certain chemical groups carried by the microfibrils. Reference may also be made for example to the document of Lavoine N et al. (Carbohydrate Polymers, 2012, (92): 735-64), which describes in particular (point 2.3, pages 747 to 748) post treatments that can be combined with various pretreatments and mechanical treatments of cellulose fibers.

### EXAMPLES

### Example 1: Fungal Strains and Culture Conditions

[0310] The strain of Aspergillus japonicus used in this study is held in the collection of the International Center for Microbial Resources—Filamentous Fungi (CIRM-CF., INRA, Marseille, France) under accession number CIRM BRFM. It was cultured on MYA2 agar medium, containing 20 g/l of malt extract, 20 g/l of agar and 1 g/l of yeast extract. The spores were collected and stored at −80° C. in 20% glycerol and 80% water.

[0311] The liquid culture media containing an autoclaved fraction of maize bran or beet pulp (supplied by ARD, Pomacle, France) as carbon source and protein secretion inducer were prepared as follows: 15 g/l of inducer; 2.5 g/l of maltose; 1.84 g/l of diammonium tartrate as nitrogen source; 0.5 g/l of yeast extract; 0.2 g/L of KH₂PO₄; 0.0132 g/L of CaCl₂·2H₂O and 0.5 g/L of MgSO₄·7H₂O. Another inducer medium was prepared using 4 g/l of Avicel (Sigma-Aldrich, USA); 10 g/l of xylose; 1.8 g/l of diammonium tartrate; 0.5 g/l of yeast extract; 0.2 g/l of KH₂PO₄; 0.0132 g/L of CaCl₂·2H₂O and 0.5 g/L of MgSO₄≮7H₂O.

[0312] The three culture media were inoculated with 2×10⁵ spores/mL of the five strains, and incubated in baffled flasks in the dark at 30° C. with rotary stirring at 105 rpm (Infors HT, Switzerland).

### Example 2: Preparation of the Secretomes

[0313] After incubation for 7 days, the cultures were stopped and the liquid medium was separated from the mycelium using Miracloth (Calbiochem, USA). 40 mL was filtered on 0.22 μm polyethersulfone membranes (Merck-Millipore, Germany) and then diafiltered and concentrated on polyethersulfone membranes with a cutoff threshold of 10 kDa (Vivaspin, Sartorius, Germany) in 50 mM sodium acetate buffer pH5 to a final volume of 2 mL. The secretomes were stored at −20° ° C., and their total concentration of proteins was evaluated by Bradford's methods (BioRad Protein Assay, Ivry, France) and BCA (Bicinchoninic Acid Protein Assay, Sigma-Aldrich) using a standard range of bovine serum albumin (BSA).

### Example 3: Gene Cloning and Recombinant Expression in Pichia pastoris

[0314] The selected protein sequences, from which the predicted sequences of the native signal peptides had been removed, were used for generating coding nucleotide sequences optimized for expression in P. pastoris. Complete synthesis of the genes was performed (Genewiz, USA) and they were cloned into the pPICZαA expression vector (Invitrogen), so as to be in phase with the signal sequence used (that of the α factor of yeast) and with the sequence coding for the C-terminal polyhistidine tag.

[0315] The plasmids were amplified by transformation of competent cells DH5α of Escherichia coli, then purified using a HiSpeed Plasmid Midi kit (Qiagen, The Netherlands), linearized with the PmeI restriction enzyme and transformed into X-33 cells of Pichia pastoris (Invitrogen) by electroporation. The transformants were isolated on agar medium containing Zeocin (100 and 500 mg/L).

[0316] To test the expression of each vector, several Zeocin-resistant transformants were cultured on a 24-well plate, in 5 mL of BMGY growth medium containing 0.2 g/L of biotin, at 30° C. and 250 rpm for about 16 h, until an optical density at 600 nm of between 2 and 6 was reached. After centrifugation, the cells were taken up in 1 mL of BMMY medium and incubated at 20° C. and 200 rpm for 3 days in order to induce expression of the proteins; the medium was supplemented each day with 3% (v/v) methanol. The culture supernatants were purified by affinity chromatography with Ni-NTA beads according to an automated procedure described by Haon et al. (“Recombinant protein production facility for fungal biomass-degrading enzymes using the yeast Pichia pastoris”. Front. Microbiol. 6. 2015), and the purified proteins were deposited on unstained SDS-PAGE gel with detection by photoactivation and fluorescence (BioRad, France) to verify their production.

[0317] In order to produce the proteins in sufficient quantities, the transformants having the best rate of secretion were cultured in 2 L of BMGY medium containing 1 mL/L of PTM4 (Pichia Trace Minerals 4) salts, 0.2 g/L of biotin in flasks at 30° C. and 250 rpm for about 16 h, until an optical density at 600 nm of between 2 and 6 was reached. Expression of the proteins was induced by incubating the cells in 400 mL of BMMY medium containing 1 mL/L of PTM4 salts at 20° C. and 200 rpm for 3 days, during which the medium was supplemented with 3% (v/v) methanol each day. The supernatants were recovered by centrifugation (4000×g, 4ºC, 10 min) and filtered on 0.45 μm membranes (Millipore) to remove the remaining cells. A His-Bind Resin chelated nickel column (1.9 cm³; GE Healthcare, UK) was connected to an FPLC Äkta apparatus (GE Healthcare) and equilibrated with 50 mM Tris-HCl (pH 7.8), 50 mM NaCl and 10 mM imidazole. After adjusting the pH to 7.8, the supernatants were loaded on the column at 4ºC. The column was washed with the equilibration buffer (50 mM Tris-HCl pH 7.8, 50 mM NaCl, 10 mM imidazole) and the enzymes were eluted with the same buffer containing 150 mM of imidazole. The eluates were concentrated using Amicon centrifugation units (cutoff threshold 10 kDa; Millipore) at 4000×g and washed several times with 50 mM sodium acetate buffer (pH 5).

[0318] A fraction of each eluate was loaded on unstained SDS-PAGE gel with detection by photo-activation and fluorescence (Bio Rad, France) to verify their purity. The concentration of proteins was determined by absorption at 280 nm using a Nanodrop ND-2000 spectrophotometer (Thermo Fisher Scientific) and theoretical molecular weights and coefficients calculated from the protein sequences.

### Example 4: Tests of Degradation of Cellulose in the Presence of Polypeptides According to the Invention

[0319] The tests of degradation of cellulose by the polypeptides with polysaccharide oxidase activity were carried out in triplicate, in a volume of 300 μL containing 1% (w/v) of Avicel (Sigma-Aldrich) or of PASC (Phosphoric Acid Swollen Cellulose), prepared from Avicel by the method described by Wood (“Preparation of crystalline, amorphous, and dyed cellulase substrates. In Methods in Enzymology (Academic Press), pp. 19-25) in 50 mM phosphate buffer pH 6. The LPMOs (0.5 to 5 μM) and the electron donor (L-cysteine or ascorbate, 10 μM to 1 mM) were added, in the presence or absence of H₂O₂ (100 μM), and the tubes were incubated in a thermomixer (Eppendorf, Montesson, France) at 50° C. and 850 rpm, for 4 to 16 h. The reaction was stopped by scalding the samples at 100° C. for at least 10 min, and then they were centrifuged at 15000×g for 5 min to separate the soluble products from the insoluble fraction.

[0320] To test the synergy of the polypeptides of interest with the CBHI of T. reesei, a reaction mixture with a total volume of 800 μL containing 1% (w/v) of cellulose nanofibrils in 50 mM acetate buffer pH 5.2, as well as 8 μg of LPMO and 1 mM of ascorbate was incubated in a thermomixer (Eppendorf) at 50° ° C. and 850 rpm, for 16 h. The samples (in triplicate) were scalded at 100° ° C. for at least 10 min, and then centrifuged at 15000×g for 5 min. The remaining insoluble fraction of the substrate was washed twice in the buffer, and hydrolysis with the CBHI from T. reesei (0.8 μg; supplied by IFPEN) was carried out in a volume of 800 μL containing 50 mM acetate buffer pH 5.2, for 30 min at 50° C. and 850 rpm. The reaction was stopped as described above, and the soluble and insoluble fractions were separated.

[0321] The mono- and oligosaccharides resulting from the degradation of the cellulose substrates were detected by HPAEC-PAD (Dionex, Thermo Fisher Scientific), by the method described by Westereng et al. (2013), using unoxidized cello-oligosaccharides (DP2 to DP6) as standards (Megazyme, Ireland).

### Example 5: Substrates and Enzyme Cocktails

[0322] Pretreated wheat straw, miscanthus and poplar were obtained from IFP Energies Nouvelles (Rueil-Malmaison, France). The biomasses were pretreated by steam explosion in acid conditions, washed with hot water to remove the free products, and dried at 55° C. After one week at room temperature, they were ground and sieved, only retaining the particles smaller than 0.8 mm, and their water content (% w/w) was determined by drying at 105° C. in a stove with natural convection (VWR, USA).

[0323] The “K975” cocktail consists of the secretome of the CL847 strain of Trichoderma reesei, produced in the presence of lactose according to the protocol detailed in Herpoël-Gimbert et al. (Comparative secretome analyses of two Trichoderma reesei RUT-C30 and CL847 hypersecretory strains, Biotechnology for Biofuels 2008, 1:18), the specific β-glucosidase activity of which is 0.8 IU/mg. It was supplemented with a commercial cocktail of β-glucosidases from Aspergillus niger SP188 (Novozyme, Denmark).

### Example 6: Enzymatic Hydrolyses

[0324] The enzymatic hydrolyses in 2-mL tubes were carried out in triplicate in a reaction volume of 1 mL, in the presence of wheat straw, miscanthus or poplar (50 mg of dry biomass), in 50 mM sodium acetate buffer (pH 4.8), to which chloramphenicol (0.1 g/L) was added to prevent microbial contamination. This mixture was incubated for at least 1 h at 45° C. with rotary stirring at 850 rpm (Infors) in order to impregnate the biomass, then the K975 cocktail was added at a rate of 5 mg/g of dry matter (DM), and the SP188 cocktail was added in amounts to give total β-glucosidase activity of 80 IU/g DM.

[0325] For the supplementation tests, 10 μL of secretomes was added (or 10 μl of buffer in the reference conditions). Hydrolysis was carried out at 45° C. with rotary stirring at 850 rpm (Infors). At each sampling time, the triplicates were scalded at 100° C. for at least 5 min to inactivate the enzymes, then cooled and centrifuged at 15000×g for 5 min, and the supernatant was withdrawn and stored at −20° C.

[0326] The miniaturized enzymatic hydrolyses were carried out on 96-well microplates, in which 100 μL of suspension of biomass at 6.3% (w/v) in 50 mM sodium acetate buffer (pH 4.8) in the presence of chloramphenicol (0.1 g/L) was distributed. During distribution, the biomass suspension was taken using a multichannel pipette in a beaker with continuous magnetic stirring, and then the plates were sealed and stored at −20° C.

[0327] For the supplementation tests, the enzymes were distributed by means of a Tecan Genesis Evo 200 robot (Tecan, Lyon, France): the K975 and SP188 cocktails were distributed in the amounts indicated above, in a volume of 15 μL, and then 10 μL of secretomes diluted 10× was added (or 10 μL of buffer in the reference conditions, present on each plate). Each test was performed in septuplicate, to which a control well is added containing the enzymes only (without biomass); one column of each plate was dedicated to the control conditions containing the biomass only (without enzymes). During hydrolysis, the sealed plates were incubated at 45° C. with rotary stirring at 850 rpm (Infors), for 24 to 96 h. At each sampling time, the corresponding plates were centrifuged after adding 120 μL of buffer, then the supernatant was filtered and stored at −20° C.

[0328] For both types of hydrolyses (“sequential” or “simultaneous”), the glucose concentration in the samples was measured using the Glucose GOD-PAP reagent (Biolabo, Maizy, France) using a standard glucose range, and the yields were calculated taking into account the amount of cellulosic glucose initially present.

[0329] Several hydrolyses were carried out for each condition, and so as to be able to combine the results, the yields obtained in the presence of secretomes were translated into percentage improvement relative to the internal reference of each hydrolysis. A Student t test was carried out for each condition to determine whether the mean value of the results was statistically different than the mean value of the references, using the p-value as a criterion.

### Example 7: Tests of Saccharification of Biomasses with T. reesei Supplementation

[0330] In order to determine whether the secretomes produced may be of interest for improving yields in enzymatic hydrolysis, they were tested in conditions approaching those envisaged in the industrial processes for bioconversion of lignocellulosic biomass. Three model biomasses, with different origin and compositions, were selected for this study: wheat straw, miscanthus and poplar. These substrates, derived from agricultural waste and from dedicated energy crops, are often envisaged as raw materials for bioethanol production in Europe. They were pretreated by steam explosion in the presence of dilute sulfuric acid (see Table 1). After washing and drying, their composition of sugars was determined by GC after acid hydrolysis.

TABLE 1
Pretreatment conditions and composition of
the three model substrates in this study

| | Poplar | Miscanthus | Straw |
|---|---|---|---|
| Steam temperature (° C.) | 195 | 180/190 | 195 |
| Pressure (bar) | 15 | 10.5/13 | 15 |
| Pretreatment time (min) | 7.5 | 7.5 | 2 |
| [H₂SO₄] | 0.7% | 0.4% | 0.7% |
| Composition (% dry weight) | | | |
| Rhamnose | 0.27 | 0.44 | 0.15 |
| Arabinose | 0.11 | 0.39 | 0.52 |
| Xylose | 0.63 | 2.09 | 1.58 |
| Mannose | 0.18 | 0 | 0.16 |
| Total glucose | 53.28 | 59.43 | 53.92 |
| Cellulosic glucose | 50.85 | 57.01 | 51.30 |
| Water content (% w/w) | 6.26% | 5.66% | 6.97% |

[0331] The cellulolytic cocktail from T. reesei used (designated K975) is derived from the CL847 strain, cultured in the presence of lactose; as the latter has rather low β-glucosidase activity, a commercial preparation of β-glucosidases from A. niger (SP188, Novozyme) was added to it in excess, in order to ensure that the potential improvements in performance on supplementation are not due to a simple increase in β-glucosidase activity. This reference cocktail was used for carrying out hydrolysis of the three biomasses selected, with a relatively high concentration of biomass (5% w/v) in order to keep close to realistic conditions from the standpoint of the method, and a low enzyme dose (5 mg/g of dry matter), corresponding for industry to conditions making it possible to reduce costs, and for which the margin of improvement of hydrolysis yields is high.

[0332] The kinetics of this hydrolysis over 5 days is presented in FIG. 1. In the chosen conditions, the final hydrolysis yield of wheat straw is close to 100%, which means that nearly all of the cellulose has been transformed into glucose monomers. Miscanthus and poplar are more stubborn, since in the same conditions they are only hydrolyzed to 50 and 60% respectively. The objectives of improvement are multiple: in the case of straw, it will be a question of increasing the yields at the start of hydrolysis (at 24 and 48 h) and therefore accelerating the reaction, whereas for miscanthus and poplar it will be possible to improve both the initial kinetics and the yield after a longer period (96 h for example).

[0333] In the same conditions, the reference cocktail was then supplemented with the various secretomes from Aspergillus. For the sake of experimental simplification, equal volumes of each of the concentrated secretomes were added to a fixed amount of cocktail, according to the protocol established in Berrin et al. (“Exploring the Natural Fungal Biodiversity of Tropical and Temperate Forests toward improvement of Biomass Conversion. Appl. Environ. Microbiol. 78, 6483-6490, 2012). The amount of proteins added is not the same in all the samples, but it reflects the initial proportions of proteins secreted by the fungal strains on each culture medium. Initially these tests were performed in tubes, in triplicate, but as the biomasses used are heterogeneous, it was found that there was considerable variability of the results. The saccharification tests were miniaturized on microplates and automated using a Tecan robot, according to a method already developed in Navarro et al. (“Automated assay for screening the enzymatic release of reducing sugars from micronized biomass. Microb. Cell Factories 9, 58, 2010).

[0334] Thus, the biomass is ground finely and a sufficiently homogeneous suspension is prepared so that it can be pipetted onto microplates, before adding a reference cocktail and various secretomes. Each assay has 7 replicates. The data obtained from three hydrolysis series (one in tubes and two on microplates) were analyzed statistically using a Student test.

[0335] With the data derived from the saccharification test that had been developed, the influence of the secretomes on the hydrolysis yield can be compared for each biomass (FIG. 2A-C). There are large differences in performance on the three biomasses: several secretomes make it possible to improve both the hydrolysis of straw and that of miscanthus, starting from 24 h.

### Example 8: Saccharification Tests of Biomass in the Presence of Polypeptides with Polysaccharide Oxidase Activity

[0336] The supplementation tests of the cocktail from T. reesei with the polypeptides for saccharification of miscanthus were carried out in triplicate by the method of enzymatic hydrolysis described above, using 5 mg of biomass, 1 mg/g DM of the K975 cocktail and 80 IU/g DM of β-glucosidase supplied by the SP188 cocktail, for 24 h at 45° C. and 850 rpm. In some of the samples, treatment with the LPMOs (2.2 μM) in the presence of 1 mM ascorbate was carried out for 24 h before the start of hydrolysis; in the others, the LPMOs and the ascorbate were added at the start of hydrolysis, at the same time as the cellulolytic cocktail.

[0337] The polypeptides were not added to the reference samples. After 24 h, the reaction was stopped and the glucose concentration in the samples was measured using the Glucose GOD-POD reagent (Biolabo).

### Example 9: Selection and Production of Fungal Proteins of Interest

[0338] So as to be able to study the function of the polypeptides of interest, it was decided to produce them heterologously in the yeast Pichia pastoris, by means of synthetic genes placed in a vector. Several versions of the sequence of Aspergillus aculeatus were expressed (with the N-terminal X273 module only, with a truncated C-terminal extension, and with the complete C-terminal extension), as well as a similar protein comprising a very short C-terminal extension, found in Podospora anserina (PaX273).

[0339] Each of the constructs tested begins with a signal peptide, followed by the n-terminal histidine involved in the catalytic triad, and ends at a variable terminal position. For the clones derived from Aspergillus aculeatus, the reference polypeptide sequence is SEQ ID No. 2. For the clone derived from Podospora anserina, the reference polypeptide sequence is SEQ ID No. 1.

TABLE 2
Polypeptide sequences selected for expression in Pichia pastoris

| | | Size | Terminal |
|---|---|---|---|
| | Source organism | (kDa) | position |
| AaX273_complete | Aspergillus | 30.2 | 314 |
| | aculeatus | | |
| AaX273_truncated | Aspergillus | 19.6 | 200 |
| | aculeatus | | |
| AaX273_Nter | Aspergillus | 19.0 | 193 |
| | aculeatus | | |
| PaX273 | Podospora | 20.7 | 209 |
| | anserina | | |

[0340] In total, 4 genes were therefore synthesized and transformed into Pichia pastoris (see Table 2). The corresponding transformants were cultured in small volumes, according to the accelerated procedure elaborated in the laboratory (Haon et al., “Recombinant protein production facility for fungal biomass-degrading enzymes using the yeast Pichia pastoris. Front Microbiol. 6, 2015) in order to verify proper expression of the proteins.

### Example 10: Investigation of a New Family of Fungal LPMOs

### Bioinformatic Analysis of the X273 Family

[0341] In order to measure the extent of the X273 family in the fungal genomes, a homology search based on the sequence of the X273 module of Podospora anserina, with a length of 165 amino acids, was carried out, using the NCBI Blast tool, and only keeping the closest sequences (e-value less than or equal to 1e⁻¹⁸).

[0342] Secondly, in order to optimize selection of the polypeptide sequences of interest, a sequence alignment carried out using Clustal Omega (EMBL-EBI) is taken as a basis, then curating manually in order to discard the following sequences:
[0343] N-ter or C-ter fragments not corresponding to whole proteins (in particular those not comprising the 1st histidine, characteristic of the LPMOs);
[0344] Sequences whose N-ter end does not correspond to a signal peptide according to the SignalP 4.1. software;
[0345] Sequences comprising important insertions or deletions, possibly due to poor splicing models;
[0346] Sequences having a very long C-terminal extension.

[0347] Besides SEQ ID No. 1 and 2, we thus get a refined list of 379 polypeptide sequences (SEQ ID No. 7 to 383), derived from fungal organisms, and mainly ascomycetes: 335 sequences, versus 41 derived from basidiomycetes and 3 from unclassified fungi.

[0348] The consensus amino acids are shown graphically in FIG. 3, after alignment of the 378 catalytic modules corresponding to the protein sequences SEQ ID No. 1, 2 and 7 to 382. The figure was generated by the WebLogo application, according to Crooks et al. (WebLogo: A Sequence Logo Generator. Genome Res. 14, 1188-1190; 2004).

[0349] The alignment of the sequences corresponding to the X273 module reveals several well conserved regions within the family. All the sequences comprise in particular an N-terminal histidine, as well as a second strictly conserved histidine, which is a characteristic of the active center (“Histidine brace”) of all the LPMOs characterized to date. There are about twenty other strictly conserved residues, including 6 cysteines potentially involved in the formation of disulfide bridges. In addition to the X273 module, most of the proteins in the list possess a C-terminal extension, of variable length depending on the species. For 7 of them, found in 4 different organisms, this extension comprises a cellulose binding module (CBM1).

[0350] In Table 3, the relative positions of these conserved amino acids are determined relative to the reference sequences SEQ ID No. 1 and SEQ ID No. 2.

TABLE 3
Conserved positions in the X273 catalytic module

| Conserved amino acids | Position in SEQ ID 1 | Position in SEQ ID 2 |
|---|---|---|
| Histidine (H) | 19, 105 | 20, 109 |
| Glycine (G) | 31, 107 | 32, 111 |
| Proline (P) | 25 | 26 |
| Arginine (R) | 28 | 29 |
| Cysteine (C) | 38, 69, 74, 157, | 39, 73, 78, 162, |
| | 163, 179 | 168, 186 |
| Asparagine (N) | 110 | 114 |
| Glutamine (Q) | 166, 174 | 171, 181 |
| Tryptophan (W) | 169 | 174 |
| Glycine (D) or | 20, 76 | 21, 80 |
| Alanine (A) | | |
| Glycine (D) or | 161 | 166 |
| Asparagine (N) | | |
| Aspartic acid (D) or | 49 | 50 |
| Asparagine (N) | | |
| Proline (P) or | 151 | 155 |
| Alanine (A) | | |
| Threonine (T) or | 175 | 182 |
| Asparagine (N) | | |
| Tyrosine (Y) or | 176 | 183 |
| Phenylalanine (F) | | |
| Aspartic acid (D) or | 181 | 188 |
| Leucine (L) | | |

### Heterologous Production and Activity Assay

[0351] The clones of P. pastoris expressing the X273 of A. aculeatus and of P. anserina were used for producing the proteins in 1 L flasks. The version of the protein of A. aculeatus retained is the one that was produced most in small volumes, i.e. the one that was truncated by leaving out about ten amino acids of the C-terminal extension. After purification, a total amount of 47.5 mg is obtained for AaX273 and 61 mg for PaX273. The purified proteins were then loaded with copper, so that their active center is functional, and the excess copper was removed by diafiltration. An analysis by inductively-coupled plasma mass spectrometry (ICP-MS) confirmed the presence of about one copper atom per molecule of X273.

[0352] Using a fluorimetric assay in the presence of Amplex Red, production of ELCL by the X273 enzymes in the presence of an electron donor (ascorbic acid) and in the absence of substrate could be established, which indicates that these enzymes have an oxidation activity and behave like the other families of LPMOs.

### Characterization of the Degradation Products of Cellulose

[0353] In order to determine whether the LPMOs have an activity on cellulose, their effect can be observed indirectly by utilizing their synergy with cellulases. Thus, after leaving the X273 proteins to act on cellulose nanofibrils (CNFs), the latter were hydrolyzed with CBHI (Ce17A) from T. reesei. The amount of cellobiose measured by ion exchange chromatography (HPAEC-PAD) at the end of this hydrolysis is greater in the samples that had been treated with X273 than in the control sample (see FIG. 4).

[0354] This indicates that the X273 seem to introduce cuts in the cellulose chains, which serve as new ends for attack by cellobiohydrolase, which therefore releases more cellobiose than when it acts alone.

[0355] Visualization of the direct action of the LPMOs on cellulose fibers is more difficult, since only the soluble polysaccharides (the degree of polymerization of which is generally under 6) are detected by chromatographic methods. However, it is possible to quantify the short cellulose chains released from the accumulation of these cleavages, and determine whether they are native or oxidized oligosaccharides (in particular of C₁ and/or C₄).

[0356] Thus, assays were conducted on PASC (Phosphoric Acid Swollen Cellulose) and Avicel (microcrystalline cellulose), in the presence of H₂O₂, and decreasing the amount of electron donor according to the conditions proposed by Bissaro et al. (“Oxidative cleavage of polysaccharides by monocopper enzymes depends on H₂O₂”. Nat. Chem. Biol. 13, 1123-1128; 2017). By increasing the amounts of AaX273 enzyme, products could be observed on both substrates. The two enzymes release cellobiose, cellotriose, cellotetraose and cellopentaose.

### Saccharification of Pretreated Biomass

[0357] After estimating the activity of f the X273 on cellulose, their activity on more complex substrates was evaluated.

[0358] As the two secretomes containing X273 had shown an improvement of hydrolysis on pretreated miscanthus, this biomass was chosen for carrying out the saccharification assays. To facilitate homogenization, a smaller proportion of biomass was used than previously (0.5% w/v), and the enzyme dose of the reference cocktail was also decreased (1 mg/g of dry matter). A dose of X273 of 0.2 mg/g of dry matter was added. Two types of hydrolysis were carried out:
[0359] by contacting the X273 proteins with the biomass for 24 h and then adding the reference cocktail; and
[0360] by allowing said proteins and the reference cocktail to act simultaneously.

[0361] The data obtained after 24 h of hydrolysis of miscanthus with the reference cocktail, with or without addition of AaX273 or PaX273, and in particular of AaX273, are illustrated in FIG. 5.

[0362] Thus, after 24 h of hydrolysis, an increase in the amount of glucose is observed in the presence of the LPMOs, mainly when the proteins are added simultaneously. There is therefore a synergy between the X273 and the cellulolytic cocktail from T. reesei.

### Example 11: Pretreatment of Cellulosic Substrate PASC in the Presence of a Selection of Enzymes Belonging to the X273 Family

[0363] The results obtained are shown in FIG. 6, according to a protocol similar to that used for FIG. 4. Four enzymes were tested, and their effect on the level of cellobiose released in the presence of a cellulase from Trichoderma reesei was compared with a PASC control without prior contacting with said enzyme.

[0364] It can thus be seen that all of these enzymes tested, of sequence SEQ ID No. 2, SEQ ID No. 175, SEQ ID No. 208, and SEQ ID No. 383, improve the accessibility of the cellulose for the cellulases, relative to a simple PASC treatment, by improving the cellobiose released after treatment with a cellulase from T. reesei (synergistic effect).

[0365] For reference, the sequence SEQ ID No. 383 has at least 40% sequence identity with SEQ ID No. 1 and SEQ ID No. 2.

### SEQUENCE LISTING

| SEQ ID | General Description |
|---|---|
| 1 | Reference polypeptide sequence of enzyme with polysaccharide |
| | oxidase activity derived from Podospora anserina |
| | (referenced PaX273) |
| 2 | Reference polypeptide sequence of enzyme with polysaccharide |
| | oxidase activity derived from Aspergillus aculeatus |
| | (referenced AaX273) |
| 3 | Signal peptide of Pax273 |
| 4 | Signal peptide of AaX273 |
| 5 | Catalytic module of Pax273 |
| 6 | Catalytic module of AaX273 |
| 7-383 | Other polypeptide sequences related to the X273 family |

SEQ ID NO. 1
MHFSTVSSALGLASLVSAHQVVLKPASRKPQDATTEACQRAMVNFYKQDE
TSYPEAFLRSNPLPDRNKCNLFLCKGYQFADNAANVQSYKPGDSVEYEVY
IRIPHSGYANYSIVDTTINKVLQSPLVSWASQYAASKPPADQTKESVKIP
ELGAQCAAAGVCVLQWHWFGAGQTYQSCTDFTVAPAEPAPEHGHGHRIRQ
QSRW
SEQ ID NO. 2
MKQTGSILALAGLVSMANAHGEVTSPQPRMPGSAMEKACGQQVYNNQEAD
NYGNIQGELQIASGQSDYDAEACDIWLCKGYKYADNTANVQSYKPGEVID
FTVDIRAPHTGTANVSVVDTATNTMLSQPLIYWSVYASTATGVTANETSF
SVTMPTDLGDKCNEAGACVLQWWWDARSIDQTYESCVDFTLSGSSSSSSS
SSSSSSSSSSSSSSSSSSAAAAVATSAASSSTSSAAETTTAASAAVTSPA
AANNIAPVSSSGPTTLATSVKQTATAAAVSSATSTSVSLPTDGTAEEQLT
WVASVFKALLNYAN
SEQ ID NO. 3
MHFSTVSSALGLASLVSA
SEQ ID NO. 4
MKQTGSILALAGLYSMANA
SEQ ID NO. 5
HGVVLKPASRKPQDATTEACGRAMVNFYKQDETSYPEAFLRSNPLPDRNK
CNLFLCKQYQFADNAANVQSYKPQDSVEYEVYIRIPHSGYANVSIVDTTT
NKYLGSPLVSWASGYAASSKPPADQTKFSVKIPELGAQCAAAGVCVLQWH
WFGAGQTYQSCTDFT
SEQ ID NO. 6
HQFVTSPQPRMPGSAMEKACGQQVYNNQEADNYGNIQGELQIASGQSDYD
AEACDIWLCKGYKYADNTANVQSYKPQEVIDFTVDIRAPHTGTANVSVVD
TATNTMLSQPLIYWSVYASTATQVTANETSFSVTMPTDLGDKCNEAGACV
LQWWWDARSIDQTYESCVDFT

1. An isolated polypeptide with polysaccharide oxidase activity, comprising a sequence having an amino acid identity of at least 20% with a reference polypeptide sequence SEQ ID No. 2 or SEQ ID No. 1, using a BLAST-P comparison method, said BLAST-P comparison method giving an e-value of 1e⁻¹⁸ or less.

2. The isolated polypeptide with polysaccharide oxidase activity as claimed in claim 1, the sequence having an amino acid identity of at least 40% with the reference polypeptide sequence SEQ ID No. 2 or SEQ ID No. 1, said BLAST-P comparison method giving an e-value of 1e⁻¹⁸ or less.

3. The isolated polypeptide with polysaccharide oxidase activity as claimed in claim 1, the sequence having an amino acid identity of at least 80% with the reference polypeptide sequence SEQ ID No. 2 or SEQ ID No. 1, said BLAST-P comparison method giving an e-value of 1e⁻¹⁸ or less.

4. The isolated polypeptide with polysaccharide oxidase activity as claimed in claim 1, comprising a reference polypeptide sequence selected from SEQ ID No. 5 to SEQ ID No. 383.

5. A composition with polysaccharide oxidase activity, comprising a polypeptide with polysaccharide oxidase activity as claimed in claim 1.

6. The composition with polysaccharide oxidase activity as claimed in claim 5, further comprising at least one polypeptide with polysaccharide degradase activity selected from: a cellulase, a hemicellulase, a ligninase and a carbohydrate oxidase.

7. A kit comprising at least:
a first part comprising a polypeptide with polysaccharide oxidase activity as claimed in claim 1, or a composition comprising said polypeptide with polysaccharide oxidase activity;
a second part comprising a polypeptide with polysaccharide degradase activity selected from a cellulase, a hemicellulase, a ligninase and a carbohydrate oxidase, or a composition comprising said polypeptide with polysaccharide degradase activity.

8. A host able to express recombinantly a polypeptide with polysaccharide oxidase activity as claimed in claim 1.

9. An isolated nucleic acid coding for a polypeptide with polysaccharide oxidase activity as claimed in claim 1.

10. A method of obtaining a sugar starting from a polysaccharide substrate, comprising at least one step of contacting said substrate with a polypeptide with polysaccharide oxidase activity as claimed in claim 1.

11. A method for producing alcohol starting from a lignocellulosic substrate, comprising obtaining a sugar by a method as claimed in claim 10, and the alcoholic fermentation of said sugar by an alcohol-producing microorganism.

12. A method for preparing a cellulosic substrate for producing cellulose fibers, said method comprising at least the following steps consisting of:
a) providing a cellulosic substrate able to form cellulose fibers;
b) in the presence of an electron donor, contacting said substrate with at least one polypeptide with polysaccharide oxidase activity in conditions suitable for ensuring oxidative cleavage of said cellulose fibers;
wherein said polypeptide with polysaccharide oxidase activity has an amino acid identity of at least 20% with a reference polypeptide sequence SEQ ID No. 2 or SEQ ID No. 1, using a BLAST-P comparison method, said BLAST-P comparison method giving an e-value of 1e⁻¹⁸ or less.

13. A method of defibrillating a cellulosic substrate, said method comprising at least the following steps consisting of:
a) providing a cellulosic substrate able to form cellulose fibers, which had been brought into contact beforehand with an electron donor and a polypeptide with polysaccharide oxidase activity, in conditions suitable for ensuring oxidative cleavage of said cellulose fibers in the presence of an electron donor; and
b) treating said cellulosic substrate mechanically, in order to defibrillate said substrate,
wherein said polypeptide with polysaccharide oxidase activity has an amino acid identity of at least 20% with a reference polypeptide sequence SEQ ID No. 2 or SEQ ID No. 1, using a BLAST-P comparison method, said BLAST-P comparison method giving an e-value of 1e⁻¹⁸ or less.

14. A method of producing cellulose fibers, said method comprising at least the following steps consisting of:
a) providing a cellulosic substrate able to form cellulose fibers;
b) in the presence of an electron donor, contacting said cellulosic substrate with at least one polypeptide with polysaccharide oxidase activity in conditions suitable for ensuring oxidative cleavage of said cellulose fibers;
c) treating said cellulosic substrate mechanically, in order to produce said cellulose fibers starting from said cellulosic substrate,
wherein said polypeptide with polysaccharide oxidase activity has an amino acid identity of at least 20% with a reference polypeptide sequence SEQ ID No. 2 or SEQ ID No. 1, using a BLAST-P comparison method, said BLAST-P comparison method giving an e-value of 1e⁻¹⁸ or less.

15. Cellulose fibers derived from a method of defibrillating a cellulosic substrate as claimed in claim 13.

16. A method of obtaining a sugar starting from a polysaccharide substrate, comprising at least one step of contacting said substrate with a composition with polysaccharide oxidase activity as claimed in claim 5.

17. Cellulose fibers derived from a method of producing cellulose fibers as claimed in claim 14.

The application's sequence listing, which the Patent Office published only in electronic form, follows.

SEQUENCE LISTING (383 sequences)

SEQ ID NO: 1 - protein, 209 aa, Podospora anserina
  >XP_001905563.1 uncharacterized protein PODANS_7_15 [Podospora anserina S mat+]
MHFSTVSSALGLASLVSAHGVVLKPASRKPGDATTEACGRAMVNFYKQDETSYPEAFLRSNPLPDRNKCNLFLCKGYQFADNAANVQSYKPGDSVEYEVYIRIPHSGYANVSIVDTTTNKVLGSPLVSWASGYAASSKPPADQTKFSVKIPELGAQCAAAGVCVLQWHWFGAGQTYQSCTDFTVAAPVAPAEPAPEHGHGHRIRGQSRW

SEQ ID NO: 2 - protein, 314 aa, Aspergillus aculeatus
  >XP_020060743.1 hypothetical protein ASPACDRAFT_74022 [Aspergillus aculeatus ATCC 16872]
MKQTGSILALAGLVSMANAHGFVTSPQPRMPGSAMEKACGQQVYNNQEADNYGNIQGELQIASGQSDYDAEACDIWLCKGYKYADNTANVQSYKPGEVIDFTVDIRAPHTGTANVSVVDTATNTMLSQPLIYWSVYASTATGVTANETSFSVTMPTDLGDKCNEAGACVLQWWWDARSIDQTYESCVDFTLSGSSSSSSSSSSSSSSSSSSSSSSSSSAAAAVATSAASSSTSSAAETTTAASAAVTSPAAANNIAPVSSSGPTTLATSVKQTATAAAVSSATSTSVSLPTDGTAEEQLTWVASVFKALLNYAN

SEQ ID NO: 3 - protein, 18 aa, Artificial Sequence
  Synthesized
MHFSTVSSALGLASLVSA

SEQ ID NO: 4 - protein, 19 aa, Artificial Sequence
  Synthesized
MKQTGSILALAGLVSMANA

SEQ ID NO: 5 - protein, 165 aa, Artificial Sequence
  Synthesized
HGVVLKPASRKPGDATTEACGRAMVNFYKQDETSYPEAFLRSNPLPDRNKCNLFLCKGYQFADNAANVQSYKPGDSVEYEVYIRIPHSGYANVSIVDTTTNKVLGSPLVSWASGYAASSKPPADQTKFSVKIPELGAQCAAAGVCVLQWHWFGAGQTYQSCTDFT

SEQ ID NO: 6 - protein, 171 aa, Artificial Sequence
  Synthesized
HGFVTSPQPRMPGSAMEKACGQQVYNNQEADNYGNIQGELQIASGQSDYDAEACDIWLCKGYKYADNTANVQSYKPGEVIDFTVDIRAPHTGTANVSVVDTATNTMLSQPLIYWSVYASTATGVTANETSFSVTMPTDLGDKCNEAGACVLQWWWDARSIDQTYESCVDFT

SEQ ID NO: 7 - protein, 213 aa, Thielavia terrestris
  >XP_003657336.1 hypothetical protein THITE_2058539 [Thielavia terrestris NRRL 8126]
MHFSLASFLTLAGLAARASAHGLVTKPATREPGSATEAACGKIMVDFYRADNTSYPEALLRANPGGLKGGYDPKKCNLWLCRGYQFADNVANVQSYKPGQVVDIEVWIRIPHKGYANVSVVDTASNTVIGSPLKSWPSNYAATANPPADQTKFNVTIPDLGGKCTEAGACVIQWYWLGQGQTYESCIDFTVPAATATAGGSSQERRIRGQTRA

SEQ ID NO: 8 - protein, 207 aa, Sordaria macrospora
  >XP_003351490.1 uncharacterized protein SMAC_00031 [Sordaria macrospora k-hell]
MHLSILSFLGLLSGVTAHGLVQSPATRSPGDATVAACGKTMVNFYKADNTSYPEALLRANPGGLKDEYNAKNCNLWLCKGYQFGDNKAGVQTYTAGQEVDYKVWIRIPHAGFANVSVVDTTTNSVIGAPLLAWPSGYAASATPPKNQTDFKVKIPGNLGGKCNQAGVCVLQWYWFGQGQTYESCTDFVVPEVTVPAECPMRRRDWRA

SEQ ID NO: 9 - protein, 196 aa, Unknown
  Fungi, >OAA68268.1 Chitin-binding, domain 3 [Sporothrix insectorum RCEF 264]
MHIIAATLLGLAATLAHGHGIVTTPATREPGDATAAVCGQTMVDFYKQDNTSYPEALMRAHPVLGKDYNAAKCNLYLCRGYQFGDNKNGVQSYKPGDVVDMEVFIRIPHKGYANVSVVDTTTNTLIGAPLIDWPDNYAATLNPPKNQTHFSVTIPDLGSKCTTPGVCVLQWYWLGQGQTYESCVDFTTPAAKKFKA

SEQ ID NO: 10 - protein, 212 aa, Chaetomium globosum
  >XP_001225978.1 hypothetical protein CHGG_08322 [Chaetomium globosum CBS 148.51]
MYLSSLSLFGLAGLITQASAHGLVREPATRGPGEATEAACGKVMADFYRADNTSYPEALLRANPGGLKEPYDPENCNLWLCRGYQFADNAANVQSYTAGQVVDFDVWIRIPHEGHANVSVVDTASNSVIGTPLVAWPDHYAGSATPPADQTKFSVTIPELGDQCAEAGACVIQWYWFGQGQTYESCVDFSIAAASTEPEHSHKHRVRGQTWA

SEQ ID NO: 11 - protein, 199 aa, Unknown
  Fungi, >KIH92601.1 hypothetical protein SPBR_03269 [Sporothrix brasiliensis 5110]
MQLSVSALLGLVAAANAHGLVTSPATRTPGAATAAVCGETMVKFYQADNTSYPEALFRANPKGIGADYNAAKCNLYLCRGYQFGDNTKNVQSYKPGEKVDMDVFIRIPHKGYANVSVVDTTTNKILGAPLIDWPNNYAATLTPPANQTKFSVTIPTTLGDQCTTAGTCVLQWYWLGQGQTYESCVDFTTPKTTPMRFTA

SEQ ID NO: 12 - protein, 203 aa, Unknown
  Fungi, >XP_003666506.1 hypothetical protein MYCTH_2311254 [Thermothelomyces thermophila ATCC 42464]
MHSGFVSLFAFAGLAAQASAHGIVTKPATRSPGEATEAACGKTMADFYRADNTSYPEALLRANPDGLKPPYDPEKCNLWLCKGYQFADNIANVQNYTVGQVVDMEVWIRIPHEGYANVSIVDTSRNSVIGEPLIAWPEGYAGSANPPKDQTKFSVKLPDLGDKCTKPSACVIQWYWFGQGQTYESCVDFTLATPAKRRRYRKY

SEQ ID NO: 13 - protein, 199 aa, Unknown
  Fungi, >XP_016590960.1 hypothetical protein SPSK_08014 [Sporothrix schenckii 1099-18]
MQLSVSALLGLVAAANAHGLVTSPATRTPGAATAAVCGETMVKFYQADNTSYPEALFRANPKGIGADYNAAKCNLYLCRGYQFGDNTKNVQSYKPGEKVDMDVFIRIPHKGYANVSVVDTTTNKILGTPLIDWPDNYAATLTPPANQTKFSVTIPTTLGDQCTTAGACVLQWYWLGQGQTYESCVDFTTPKTTPMRFTA

SEQ ID NO: 14 - protein, 201 aa, Unknown
  Fungi, >OIW26017.1 hypothetical protein CONLIGDRAFT_647738 [Coniochaeta ligniaria NRRL 30616]
MQLSLASLLGLAALVSAHGLVQKPAARTPGDATGAACGKTMETFYQIDNTSYPEALLRANPKGLTDGYDAKKCNLWLCRGYQFADNAAHVQAYKPGDVVDMEVWIRIPHKGYANVSVVDTATNSVVGTPLLVWKDNYAASANPPKDQTQFSVTVPQLGGKCTTPGACVIQWYWLGQGQTYESCIDFTVPAATPAIRGRTPK

SEQ ID NO: 15 - protein, 191 aa, Unknown
  Fungi, >KLU88284.1 hypothetical protein MAPG_07271 [Magnaporthiopsis poae ATCC 64411]
MLFITTLLCLVAQASAHGLVTSPATRQPGAATEVACGKKMVNFYKADGTSYPEAFQRTAGWNTGGYNATTCNMWLCKGYQFGDNKAQVQKYAPGTVFPVAVKIRIPHKGYANVSVVDTTTNKIIGEPLRVWREGYADPAKFPNMLGDQVNFNVTVPDLGSKCTVAGVCVVQWHWFGQGQTYQSCIDFTQTP

SEQ ID NO: 16 - protein, 197 aa, Unknown
  Fungi, >XP_016641170.1 hypothetical protein SAPIO_CDS7490 [Scedosporium apiospermum]
MVSSSVLGLSALVALVQAHGLVESPAARAPGEATAAVCGQNMVDFYKADGTSYPEALMRSPNWQNGITEDCDLYLCKGYQFEDNLENVQEYKAGDKVDFKVQIRIPHVGYANVSVVDTAKNAVIGDALKVWESGYADGAKFPNLPADETSFSVTIPELGGQCTEPGACVLQWYWLGQGQTYESCVDFVVPGAAAEEE

SEQ ID NO: 17 - protein, 191 aa, Unknown
  Fungi, >XP_009223696.1 hypothetical protein GGTG_07608 [Gaeumannomyces tritici R3-111a-1]
MLFLATIIGLLAQASAHGVVISPATRQPGAATAAACGKKMVDFYKADGTSYPEAFQRTAGWSTGGYNPATCNMWLCKGYQFADNAAQVQRYAAGAEVAVAVTIRIPHKGYANVSVVDTKANKVVGEPLRVWRDGYADPAKFPNMLGDQVKFNITVPDLGSKCSVAGTCAIQWHWFGQGQTYQSCIDFTQTP

SEQ ID NO: 18 - protein, 203 aa, Unknown
  Fungi, >EEH07473.1 conserved hypothetical protein [Histoplasma capsulatum G186AR]
MHLITSLLTLTAIATQVSGHGLVKSPAARVPGDAAAAVCGQTMVNFYKADNTSYPEALIRAGGTKDPKYNPKLCNLWLCRGYQFQDNADHVFEYKPGDKVPIEVFIRVPHLGYANVSVVDTMKNEVVGEPLKAWKEYADPAKFPNLPEDQVKFSVTVPDLMGKCAKPGRCVIQWYWLGAKQTYESCIDFTQMAPEAPKIRGRS

SEQ ID NO: 19 - protein, 206 aa, Unknown
  Fungi, >EER45624.1 chitin binding protein [Histoplasma capsulatum H143]
MHLITSLLTLTAIATHVSGHGLVKSPAARVPGDAAAAVCGQTMVNFYKADNTSYPEALIRAGGTKDPKYNPKLCNLWLCRGYQFQDNADHVFEYKPGDKVPIEVFIRVPHLGYANVSVVDTMKNEVVGEPLKAWKEYADPAKFPNLPEDQVKFSVTVPDLMGKCAKPGRCVIQWYWLGAKQTYESCIDFTQMAPEAPQIRGRSWRL

SEQ ID NO: 20 - protein, 203 aa, Unknown
  Fungi, >XP_001537763.1 conserved hypothetical protein [Histoplasma capsulatum NAm1]
MHLITSLLTLTAIATHVSGHGLVKSPAARVPGDAAAAVCGQTMVDFYKADNTSYPEALVRAGGTKDPKYNPKLCNLWLCRGYQFQDNADNVFEYKPGDKVPIEVFIRVPHLGYANVSVVDTMKNEVVGEPLKAWKEYADPAKFPNLPEDQVKFSVTVPDLMGKCAKPGRCVIQWYWLGRRQTYESCIDFTQMAPEAPKIRGRS

SEQ ID NO: 21 - protein, 196 aa, Unknown
  Fungi, >PKS09221.1 hypothetical protein jhhlp_003835 [Lomentospora prolificans]
MVSSSALGLAALVALVQGHGLVESPAARAPGETTSAICGQHMVDFYKADGTSYPEALMRTANWQEGITEECDLYLCKGYQFEDNVDNVHEYNAGDVVDFKVQIRIPHVGYANVSVVDTAKNAVIGDPLKVWESGYADGAKFPNLPEDETSFSVTIPELDGQCAEPGACVIQWYWFGQGQTYESCVDFVVPAAADEE

SEQ ID NO: 22 - protein, 210 aa, Unknown
  Fungi, >PGH15443.1 hypothetical protein AJ79_02420 [Helicocarpus griseus UAMH5409]
MHLPTSLLTLTSLLVTHAYAHGLVSSPITRTPGDATAAVCGQTMVDFYLADNTSYPEALLREGGLDENYDPELCNLWLCKGFQFGDNSAKVVEYVAGDEVPIEVFIRIPHLGFANVSIVDTSVNAVVGEPLRVWEDGYADPAEFPNLPEDQVKFSVTVPELGGLCVEPGKCVIQWYWFGAEQTYESCIDFTQPAPDPDAVPNVEARYWTA

SEQ ID NO: 23 - protein, 203 aa, Unknown
  Fungi, >ELQ37502.1 hypothetical protein OOU_Y34scaffold00590g16 [Magnaporthe oryzae Y34]
MHSSIPMLLALVAQAASHGMVTSPATRQPGPAAAAVCGQTMVDHYTADGTSYPENLQRNPAWNGTGYDAARCNLWLCKGYQLGDNEAQVQRYAAGDVVDFAVNIRIPHRGFANVSVVDLAANEVVGEPLRVWGDGYADPASFPNLPRDQVEFNVTVPELGGRCVEAGACALQWYWFGQGQTYQSCVDFTQEASAYAIRGRRRL

SEQ ID NO: 24 - protein, 203 aa, Unknown
  Fungi, >OJD13972.1 hypothetical protein AJ78_05632 [Emergomyces pasteuriana Ep9510]
MHFITSLLTLTTIATLAFGHGLIKSPAARVPGDAAAAVCGQTMVDFYKADNTSYPEALIRAGGTRDPKYNPKLCNLWLCKGYQFKDNADDVFEYKPGEKIPIEVFIRVPHLGYANVSVVDTMKNAVVGEPLKTWKEYADPAQFPDLPEDQVKFSVTVPDLKGKCAKPGQCVIQWYWLGAKQTYESCIDFTQLAPEVPKLRGSS

SEQ ID NO: 25 - protein, 194 aa, Unknown
  Fungi, >OTA91849.1 hypothetical protein M434DRAFT_75602 [Hypoxylon sp. CO27-5]
MLPQLVSLAALAATVSAHGLISKPTPRGPGDASVAACGASVVNNIKGDKTSHVEGLPELAAADSGYHGELCNLWLCRGLQYADNAANVQKYAPGQTVNIQVQLSIPHAGSANVSIVDTKTNTIIGKPLLSWPSGYADERQFYAHQTPANQTNFNVTIPEDLGSQCSEAGACVIQWWWYGTGARQTYESCVDFTA

SEQ ID NO: 26 - protein, 193 aa, Unknown
  Fungi, >OTB07226.1 hypothetical protein M426DRAFT_85770 [Hypoxylon sp. CI-4A]
MLTQIVSLAALAATVSGHGLITKPVPRGPGDASIAACGSAVVNNIKGDETSHVEGLPELAAADAAYNADLCNLWLCRGLQFADNAANVQKYAPGQSVNIEVELSIPHAGAANVSIVDTKTDSIISELLSWPSGYADEREFYAHQTPANQTNFNVTIPEDLGSQCSEAGACVIQWWWYGTGAKQTYESCVDFTA

SEQ ID NO: 27 - protein, 194 aa, Unknown
  Fungi, >OTA66810.1 hypothetical protein K449DRAFT_325848 [Hypoxylon sp. EC38]
MLPQLVSLAVFAATVSAHGLISKPTPRGPGDASVAACGASVVNNIKGDKTSHVEGLPELAAADSGYHGELCNLWLCRGLQYADNAANVQKYAPGQTVNIQVQLSIPHAGSANVSIVDTKTNTIIGKPLLSWPSGYADERQFYAHQTPANQTNFNVTIPEDLGSQCSEAGACVIQWWWYGTGARQTYESCVDFTA

SEQ ID NO: 28 - protein, 194 aa, Unknown
  Fungi, >OTB20120.1 hypothetical protein K445DRAFT_312528 [Daldinia sp. EC12]
MYSQLLPLAALAATVSGHGLITKPTPRGPGDASSAACGSSVVANIKGDLTSHVEGLPELAAKDTGYHGDLCNLWLCRGLQYADNAANVQAYKPGQKVTIEVQLTIPHAGSANVSIVDTKTNTIIGEPLLSWPSGYADERQFYAHQTPANQTKFDVTIPEDLGSKCADAGSCVIQWWWYGTGAKQTYESCIDFTA

SEQ ID NO: 29 - protein, 197 aa, Unknown
  Fungi, >GAP89295.1 putative chitin binding protein [Rosellinia necatrix]
MLLTTTTLLSLAAVVRGHGYIASPAMRMPGEATTAACGRSVVADIVRDKTSHVEGLPELAARDAGYQAARCNLWLCRGVQFADNAANVQAYRPGQVVPVKVALTIPHVGSANVSVVDVKTNAVLGPPLLAWPAGYADERQFYGKTLPANQTDFNITIPTTLGAKCATAGDCVIQWWWYGTGARQTYESCIDFTVAGA

SEQ ID NO: 30 - protein, 209 aa, Unknown
  Fungi, >ORY68417.1 hypothetical protein BCR38DRAFT_481909 [Pseudomassariella vexata]
MMLIRHLLPLAALSATALGHGYVSSPPARAPGEASIAACGNSVVNDIKKDNTSHVEGLPELAATDAGYHADQCNLWLCRGLQFGDNAANVQKFTPGQSVQVKIKLAIPHAGGANVSVVDTKKNAIIGKSLISWASGYADEQQFYSGKTPEDQVDFNVTIPTDLGSACAEAGACVLQWWWYGTGARQTYESCVDFTVASAAANSTKRFNA

SEQ ID NO: 31 - protein, 204 aa, Unknown
  Fungi, >PSN72193.1 hypothetical protein BS50DRAFT_485030 [Corynespora cassiicola Philippines]
MHFTTATLLALLPSALGHGLITSPPSRPAGDALVQNCGQGVTTNIKQDNTSYVEALPKLAAADKAYNPAKCNLWLCKGLQFADNAANVQTWSAGQVVPVKVWVRIPHEGVANVSIVDTKANKVVGDMLKVWTKGYAPGRSEKDVPLEQREFSVTVPEGLEEKCAVAGDCVLQWWWFGTGAKQTYESCVDFAISKPAVKSRSFIA

SEQ ID NO: 32 - protein, 196 aa, Unknown
  Fungi, >EMR64088.1 putative chitin binding protein [Eutypa lata UCREL1]
MRTTIAILASLPPLALGHGLISSPPARTPGEATVAACGPKIPAEITSDPTSHVEGLPELGAADNFDPAVCNVWLCKGQQFADNAANVQVYAPGEVVPIQVDLTIPHVGSANVSVVETATNAVLGQPLLSWPSGYADEREFYAGTTPADQTDFSVTIPDDLGGKCAEAGACVIQWWWYGTGARQTYESCVDFTVSEA

SEQ ID NO: 33 - protein, 197 aa, Unknown
  Fungi, >GAW22382.1 hypothetical protein ANO14919_119190 [fungal sp. No.14919]
MLSTLLQLASLAALAQGHGYISTPAMRMPGESTTSACGKSVVADIVRDKTSHVEGLPELAAKDSGYKPAQCNLWLCRGVQFADNKANVQTYKPGQTVEIKIDLTIPHAGSANVSIVDTNTNTIIGPALLSWPSGYADERQFYGHTLPANQTDFSIEIPTTLGSKCASAGDCVIQWWWYGTAAKQTYESCIDFTVAAA

SEQ ID NO: 34 - protein, 269 aa, Aspergillus ruber
  >EYE99083.1 chitin binding protein [Aspergillus ruber CBS 135680]
MKQASSVLALASIVSLAHGHGFISSPEPRMPGSAMSSACGQQIYNNQKADNYGNVQGELQVANGQDDYDAEKCDIWLCKGYKFADNKDNVQSYSAGQTVKFEIDIRAPHTGVANVSVVDTNSNTVIGSPLKSWDKYASTETGVTDDETNFSVTIPENLGSKCSTAGDCVLQWYWFAESIDQTYESCVDFTVGGSSSGSSSASSAGTTTAAANNKVASLPSTMATVAKQQATSSAAPVASSGVSIPKDGSSEEQLNWVSNLVRSIVNYGA

SEQ ID NO: 35 - protein, 211 aa, Glarea lozoyensis
  >XP_008080727.1 hypothetical protein GLAREA_07849 [Glarea lozoyensis ATCC 20868]
MYISALAVLALSTTALSHGIITKPIPRAPGSASLSFCGPTVTNNIKGDNTSHVEDLPEAAAKDKLYQGAALCNLWLCRGLQYADNLKNVQNWTTGQVVPVEVYLRIKHAGSANVSIIDTKTNKYVKGGEKLVYWPTGYADEAVKNTPANQTKFDVKIPDLGGACNVAGACTLQWWWYGTKARQTYESCVDFKITDPVVPVIPPVKSRFNRN

SEQ ID NO: 36 - protein, 288 aa, Penicillium flavigenum
  >OQE23491.1 hypothetical protein PENFLA_c011G00159 [Penicillium flavigenum]
MKQFTSALAIASIVSLVNGHGFVTTPKARQPGTAMGAACGQQVLSNQGSDKYGNIQGELQIASSQNDYKTEECDIWLCKGYKFADNKDNVQSYKAGQKVDFTVDIRAPHTGVANVSVVDTASNKVIGKPLISWDEYASTATGVTDDETNFSVTIPDDLGSQCATAGDCVLQWYWFAESIDQTYESCVDFTLGGSGGAAPVESSASSSSATEIAVTSAPSVAVQTPTTAAAQPTTFATTARQSATSAASQAPTASAVPSASASDLPFPTDSATDVLTWLQALLGNLMGN

SEQ ID NO: 37 - protein, 271 aa, Aspergillus glaucus
  >XP_022404282.1 hypothetical protein ASPGLDRAFT_118036 [Aspergillus glaucus CBS 516.65]
MKQAGSVLALASIVSLAHGHGFISSPEPRMPGSAMSSACGQQIYNNQKADNYGNVQGELQVANGQDDYSAEKCDIWLCKGYKFADNKDNVQSYSAGQTVKFEIDIRAPHTGVANVSVVDTNSNTVIGSPLKSWDKYASTETGVTDDETNFSVTIPENLGSKCSTAGDCVLQWYWFAESIDQTYESCVDFTVGGSGSGSSSASSAGTTTSAAANNNKVASLPSTMATVAKQQATSSAAPAASSGTSIPKDGSSEEQLNWISNLVRSIVNYGA

SEQ ID NO: 38 - protein, 211 aa, Pyrenochaeta
  >OAL51644.1 hypothetical protein IQ07DRAFT_386717 [Pyrenochaeta sp. DS3sAY3a]
MHFTTAALLTLIPSVLSHGLITTPPSRPTGPAIIANCGPKVEQDIRLDNTSHVEGLPELAAKDGAKYKPALCNLWLCKGLQFADNPAANIQTWQPGQVVDIKVWLRIPHEGSANVSIVDTKTDKILGSMLKVWSKGYAPGRKETDAPLDQREFSVTIPEGLEEKCAVAGDCVLQWWWYGTGAKQTYESCVDFKILKKGMRGGGPPGKKFVA

SEQ ID NO: 39 - protein, 293 aa, Corynespora cassiicola
  >PSN62263.1 hypothetical protein BS50DRAFT_141639 [Corynespora cassiicola Philippines]
MKSYTAALGLAGLVSSVAGHGYIVSPAPRMPGDAMSASCGQQMFNNQNSDHYGNVQGQLQVTNGQADYDAAACNVWLCKGYQFDDNTANVQEFTAGQTVAMEVEIRAPHTGTANVSIVKTSSNSVIGTPLISWDEYASNSAPIPEEQTKFDITIPADIGSECATAGDCVIQWFWDARSIDQTYEGCIDFTVGGSGSGSPAPSASAPAATTPAPSAPAVSSTPAPTSAAAEDAPAPAPTASSAPSPVPSQGANNSLPETFTLEQFITWLKETTSLSATAKRALVARIHARAFNM

SEQ ID NO: 40 - protein, 289 aa, Penicillium rubens
  >XP_002561603.1 Pc16g13040 [Penicillium rubens Wisconsin 54-1255]
MKQFTSALAIASIVSLVNGHGFVTTPKARQPGTAMGAACGQQVLSNQGSDKYGNIQGELQIASGQNDYKAEECDIWLCKGYKFADNKDNVQSYKAGQKVDFTVDIRAPHTGVANVSVVDTASNKVIGKPLISWDEYASTATGVTDDETNFSVTIPDDLGSQCATAGDCVLQWYWFAESIDQTYESCVDFTLGGSGGAAPVESSASSASSATEIAVTSAPSVAVQTPTTAAAQPTTFATTARQSATSAASQAPTASAVPSASASDLPFPTDSATDVLTWLQALLGNLMGN

SEQ ID NO: 41 - protein, 299 aa, Penicillium nordicum
  >KOS47852.1 hypothetical protein ACN38_g1208 [Penicillium nordicum]
MKNFTPALAFASIISLVNAHGFVTKPEARQPGTAMGDACGQQVLSNQGSDKYGNVQGELQVASSQDDYKEAECDIWLCKGYKFDDNKDNVQSYKAGQKVPFTVDIRAPHTGVANVSVVATSSNKVIGAPLISWDVYASTASGVKADETDFSVTIPDDLGSQCATAGDCVLQWYWYAESIDQTYESCVDFTVGGSGSAPVASSASSASEIAVTTTPSGAVQTPTTAVSTTAAAEPSSSTVAAQATTFATTARPSATSAAAQAPTSSAEPSASASALPFNTGSASDVLSWLQALLGNLVGN

SEQ ID NO: 42 - protein, 268 aa, Aspergillus cristatus
  >ODM18704.1 hypothetical protein SI65_05321 [Aspergillus cristatus]
MKQAGPVLALASIVSLAHGHGFISSPKPRMPGSAMESACGQQIYNNQKADNYGNVQGELQVANGQDDYNAEKCDIWLCKGYKFADNKDNVQSYSAGQTVKFEIDIRAPHTGVANVSVVDTKSNTVIGSPLKSWDKYASTETGVTDDDTNFSVTIPENLGSKCSTAGDCVLQWYWFAESIDQTYESCVDFTVGGSGSGSASSAGTTTSAAANNKVASQPSTMATVAKQQATASAAPAASSGVSIPKDGSSEEQLNWVSNLVRNIVNYGA

SEQ ID NO: 43 - protein, 285 aa, Aspergillus versicolor
  >OJI96947.1 hypothetical protein ASPVEDRAFT_119832 [Aspergillus versicolor CBS 583.65]
MKQATSILAAAGLISLANAHGYITTPKPRLPGDAMSSACGQQIYNNQKSDRAGNVQGELQIGANQEDYNEEACHIWLCKGYQFDDNKENVQQYSAGQTVDFVVDIIAPHTGVANVSVVDTASNTVIGEPLKSWAKNYASTETGITKDDTDFSITIPDNLGSQCSEAGACVIQWYWFAESIDQTYESCVDFTVGGSGSGSGSGSSGSGSSGSTASGASTTTAPAQTQSTAKAIEVPTTLSTATRPAETTTEAATETAQETAVPTDGSSDDQMNWLSSIFKAVTSRQ

SEQ ID NO: 44 - protein, 340 aa, Penicillium roqueforti
  >CDM34753.1 Chitin-binding, domain 3 [Penicillium roqueforti FM164]
MKSFTPALAFASIISLVNAHGFVTSPAAREPGTAMGAACGQQVLSNQESDKYGNIQGELQVAATQTDYNAAECDIWLCKGYKFADNQANIQSYTAGEEVAFTVDIRAPHTGVANVSVVQTSSNTVIGSPLISWDVYASVATGVTANETSFSVTIPDDLGSQCATAGDCVLQWYWYAESIDQTYESCIDFTLGGSGSSAVASTSSTSSTSSISSTSSSTVVAATTTPTAAVVETPTTAAVQPTTSSTTVAAVVKTPTTAAVQSTTPSITVAAQPTTSTTTVAAQPTTFATTVRQSTTSAAAQVPTTSADASATTSAVSIPTGSAADVLSWIESLLGNLVGN

SEQ ID NO: 45 - protein, 250 aa, Colletotrichum graminicola
  >XP_008095359.1 hypothetical protein GLRG_06483 [Colletotrichum graminicola M1.001]
MQAKILAVLSFAAAVSAHGKVTSPTPRVAGQAFEEACGSTLLNTEKSDPFGNIQGLAQQAGKNLDASKCDLDLCKGYKFADNAANVQSFSPGEKIDFKVEIRAPHTGVANVSVVDTAKNSIIGSPLISFTNYASTKTGVAANNTAFSVTLPESLPATCATAGNCVLQWWWDSREAGQTYMSCVDFTSAGSGSGPGSDSGSPAPAPSAAVPTTLVTSSAPAATKPATPAASDEPSSCNKRRSAKRALRQRI

SEQ ID NO: 46 - protein, 315 aa, Penicillium expansum
  >XP_016602771.1 Chitin-binding, domain 3 [Penicillium expansum]
MKNFTPALAFASIISLVNAHGFVTSPAARQPGTAMGAACGKQVLSNQESDKYGNIQGELQVAATQSDYNAAECDIWLCKGYKFADNKDNVQSYTAGEKVDFTVDIRAPHTGVANVSVVTTSSNKVIGAPLISWDVYASTATGVTANETSFSVTIPDDLGSQCATAGDCVLQWYWYAESIDQTYESCVDFTIGGSGSASAASSATSSAASSTSSATEIAVTTTPTAAVQTPTTAAAESTTSSTTVAPEPSTSSTTVAAQPTTFATTARPSTTSAEAQVPTASAASSTSASALPFPTDSASHVLSWLEALVGNLVGN

SEQ ID NO: 47 - protein, 267 aa, Colletotrichum chlorophyti
  >OLN96303.1 hypothetical protein CCHL11_04500 [Colletotrichum chlorophyti]
MQSKIFTALSFVAAVSAHGKLMEPTPRPAGDAFKEACGNTLWNTEQSDPYGNIQGLAQQAGSSLDASKCDLALCKGYQFADNSANIQSYTPGQTIDMKVEIRAPHTGVANVSVVDTTTNSIIGQPLISFENYASTKTGVAANNTAFSVTLPDTLPATCSTAGNCVLQWWWDSAEAGQTYMSCVDFTSGGSGSGSAPSTPSAAPSAPSAAPTTLQTVASPTPTPSTPATGSGEEADPVEPTPTPAASAPASSCNKRRRNAKRALRKRF

SEQ ID NO: 48 - protein, 267 aa, Colletotrichum sublineola
  >KDN61921.1 hypothetical protein CSUB01_09931 [Colletotrichum sublineola]
MQSKILAVLSFAAAVSAHGKVMSPTPRPAGDAFKAACGDTLFNTEKSDPFGNIQGLAQQAGSRLDPSKCDLALCKGYKFADNAANVQSFTPGQTIPFQVEIRAPHTGVANVSVVDTAKNAIIGSPLISFTNYASTKTGVAANNTAFSVTLPESLPATCATAGNCVLQWWWDSAEAGQTYMSCVDFTSAGGSGSGSGSPAPAPSAAAPSTLLTSAVPAATKPATPVATPSAAASDASVSAIPVPASETLIPRRARVQETLAKKWLNTS

SEQ ID NO: 49 - protein, 301 aa, Penicillium solitum
  >OQD90355.1 hypothetical protein PENSOL_c058G03514 [Penicillium solitum]
MKNFTPALAFASIISLVNAHGFVTKPEARQPGTAMGAACGQQVLSNQGSDKYGNIQGELQVASSQSDYNAAECDIWLCKGYKFADNKDNVQSYTAGQKVPFTVDIRAPHTGVANVSVVSTSSNKVIGAPLISWDVYASTATGVKADETSFSVTIPDGLGSQCATAGDCVLQWYWYAESIDQTYESCVDFTVGGSGSAPVASSASSASSTSSATEIAVTTTPSAAVQTPTTAAAEPTSSTTVAAQPTTFATTARPSATSAAAQVPTSSAEPSASASALPFSTGSASDVLSWLEALLGNLVGN

SEQ ID NO: 50 - protein, 227 aa, Colletotrichum higginsianum
  >CCF31728.1 hypothetical protein CH063_16082 [Colletotrichum higginsianum]
  UNSURE 206: Xaa is any amino acid
MQSKIITVLSLVAAVSAHGKVTSPTPRPAGDAFKEACGTTLWNTEQSDPYGNIQGLAQQAGSSLVASQCQLELCKGYKFADNAANVQSYTPGQTVDFEVEIRAPHTGVANVSVVDTTSNSIIGAPLISFENYASTKTGVAANNTAFSVTLPDSLPAECATAGNCVLQWWWDSAEAGQTYMSCVDFTSGSGSGSGSAPATPSAAPTXPPDLRHALGQHRPLVETNTVW

SEQ ID NO: 51 - protein, 287 aa, Aspergillus terreus
  >XP_001210729.1 hypothetical protein ATEG_00643 [Aspergillus terreus NIH2624]
MKYTSSVLALAGLASMAHGHGFVKSPQPRMPGKAMQAACGQQMTINQESDNYGNIQGELQVANGQSDYNAQKCDIWLCKGYKFADNKDNVFSYSAGQKVDFTVDIRAPHTGVANVSVVDTASNSVIGSPLKSWDNYASTATGVTEDETNFSVTIPDDLGSQCSEAGACVLQWYWFAESIDQTYESCVDFTVGGSGSGSSSGSSSSASASSSTAEVAITTTPSSNNNAASSVPTSAPTTLATSVRQSATVPAVSTPTASGSMSIPTDGTAEEQLNWVASLLKALLKYT

SEQ ID NO: 52 - protein, 205 aa, Paraphaeosphaeria sporulosa
  >XP_018033177.1 hypothetical protein CC84DRAFT_920999 [Paraphaeosphaeria sporulosa]
MFSAIATGLLLAPVVLSHGIITTPPSRAIGPAISTACGQAITSAIKSDNTSYVEQLTKLASADSKFNPAACDLYLCKGLQFSDNSANVQTWKAGDVVPIKIWLRIPHEGIANVSIVSTKQNKKVGDFLKLWTAGYAPGKSTNDVPLSQREFSVTVPSGLETTCANAGDCVLQWWWLGTAAKQTYESCVDFKIAGSAAYQGVEFTA

SEQ ID NO: 53 - protein, 260 aa, Colletotrichum higginsianum
  >XP_018153138.1 Chitin binding protein [Colletotrichum higginsianum IMI 349063]
MQSKIITVLSLVAAVSAHGKVTSPTPRPAGDAFKEACGTTLWNTEQSDPYGNIQGLAQQAGSSLVASQCQLELCKGYKFADNAANVQSYTPGQTVDFEVEIRAPHTGVANVSVVDTTSNSIIGAPLISFENYASTKTGVAANNTAFSVTLPDSLPAECATAGNCVLQWWWDSAEAGQTYMSCVDFTSGSGSGSGSAPATPSAAPTTLLTSAIPSATPVTPAPAASDEAAAPVATPSAAPSEPASSCTKRRAAKRALRKRM

SEQ ID NO: 54 - protein, 301 aa, Penicillium polonicum
  >OQD66791.1 hypothetical protein PENPOL_c004G04645 [Penicillium polonicum]
MKNFTPALAFASIISLVNAHGFVTKPEARQPGTAMGAACGAQVLSNQGSDKYGNIQGELQVASSQSDYKAAECDIWLCKGYKFADNKDNVQSYKAGQKVPFTVDIRAPHTGVANVSVVATSSNKVIGAPLISWDVYASTATGVKADETDFSVTIPEDLGSQCATAGDCVLQWYWYAESIDQTYESCVDFTVGGSGSAPVASSASSASSTSSATEIAVTTTPSGAVQTPTTPAAEPTSSTTVAAQPTTFATTARPSATSAPAQVPTSSAVPAASASGLPFSTGSASDVLSWLEALLGNLVGN

SEQ ID NO: 55 - protein, 260 aa, Colletotrichum nymphaeae
  >KXH49608.1 hypothetical protein CNYM01_07601 [Colletotrichum nymphaeae SA-01]
MQSNILTVLSFVAAVSAHGKVTSPTPRPAGDAFKEACGTTMWNTEQSDPYGNIQGLAQQAGNSLDSSKCELALCKGYKFADNSANIQSYTPGQTVDFKVEIRAPHTGVANVSVVDTTSNSIIGSPLISFTNYASTKTGVAANNTAFSVTLPDSLPSNCGTAGNCVLQWWWDSAEAGQTYMSCVDFTSGSGSGTGSGSGSATPSAAPTTLVTSAVASATPSTPASGSSDQAADPVSATPSATPSSSAPCKRNAKRALRKRF

SEQ ID NO: 56 - protein, 262 aa, Colletotrichum simmondsii
  >KXH53699.1 hypothetical protein CSIM01_07737 [Colletotrichum simmondsii]
MQSNILTVLSFVAAVSAHGKVTSPTPRPAGDAFKEACGTTMWNTEQSDPYGNIQGLAQQAGNSLDSSKCELALCKGYKFADNSANIQSYTPGQTVDFKVEIRAPHTGVANVSVVDTTSNSIIGSPLISFTNYASTKTGVAANNTAFSVTLPDSLPSNCGTAGNCVLQWWWDSAEAGQTYMSCVDFTSGSGSGSGTGSGSGSATPSAAPTTLVTSAVASATPSTPASGSSDQAADPVSATPSATPSSSAPCKRNAKRALRKRF

SEQ ID NO: 57 - protein, 260 aa, Colletotrichum fioriniae
  >EXF74752.1 hypothetical protein CFIO01_05422 [Colletotrichum fioriniae PJ7]
MQSNILTVLSFVAAVSAHGKVTSPTPRPAGDAFKEACGTTMWNTEQSDPYGNIQGLAQQAGNSLDSSKCELALCKGYKFADNSANIQSYTPGQTVDFKVEIRAPHTGVANVSVVDTTSNSIIGSPLISFTNYASTKTGIAANNTAFSVTLPDSLPSNCGTAGNCVLQWWWDSAEAGQTYMSCVDFTSGSGSGSGTGSGSATPSAAPTTLVTSAVASATPSTPASGSSDQAADPVSATPSATPSSSAPCKRNAKRALRKRF

SEQ ID NO: 58 - protein, 296 aa, Penicillium freii
  >KUM65260.1 hypothetical protein ACN42_g1834 [Penicillium freii]
MKNFTPALAFASIISLVNAHGFVTKPEARQPGTAMGAACGAQVLSNQGSDKYGNIQGELQIASSQSDYKAADCDIWLCKGYKFADNKDNVQSYKAGQKVPFTVDIRAPHTGVANVSVVATSSNKVIGAPLISWDVYASTASGVKADETDFSVTIPDNLGSQCATAGDCVLQWYWYAESIDQTYESCVDFTVGGSGSAPVASSSTSSATEIAVTTTASGAVQTPTTPAAEPTSSTTVAAQPTTFATTARPSATSAPAQVPTSSAVPAASASGLPFSTGSASDVLSWLEALLGNLVGN

SEQ ID NO: 59 - protein, 265 aa, Colletotrichum orbiculare
  >ENH88742.1 chitin binding protein [Colletotrichum orbiculare MAFF 240422]
MQSKIVSVLSFVAAVSAHGKVTSPTPRPAGDAFKEACGTTLWNTEQSDPFGNIQGLAQQAGSSLDASKCDLSLCKGYKFADNAANVQSYTPGQTVDFKVEIRAPHTGVANVSVVDTTSNSIIGAPLISFENYASTKTGVAANNSAFSVTLPDTLPANCGTAGNCVLQWWWDSAEAGQTYMSCVDFTSGGSGSGSEPATPATPATPSAAPTTLQTVATPTATPSTPASNASDESDYPVSAAPSASAPADSSCNKRRSTKRALRKRF

SEQ ID NO: 60 - protein, 306 aa, Aspergillus nidulans
  >XP_658382.1 hypothetical protein AN0778.2 [Aspergillus nidulans FGSC A4]
MKHATTVLAAAGLVSLANAHGYISSPQPRMPGSAMAAACGQQVYNNQAADRAGNVQGELQVAASQSDYDADACHIWLCKGYQFDDNTDNVQSYTAGETVDFVIDIVAPHSGVANVSVVDTASNSVIGSALKSWDVYASTETGVTEDETNFSITIPDNLGSQCSEAGACVLQWYWYAESIDQTYESCVDFTVGGSGNGSGSSGSSSSSAAAPSSTSPAAASTSTSTTEATTAAPTSTTTTEAKVQVPTTLSTATRPAETTTATETATETAASSAATGVPTDGTTSEQLNWVSSIFKALYNRDCQVAS

SEQ ID NO: 61 - protein, 293 aa, Eutypa lata
  >EMR67698.1 putative chitin binding protein [Eutypa lata UCREL1]
MQSVFVISVGLAGLVSTVAGHGFVTSPTARMPGDAMAAACGQQVASNQESDNYGNIQGELQVASSQTDYDESACNIWLCKGFKFDDNTANVQSFTAGQVVPFTVDIRAPHTGVANVSIVKTSSNSVIGDPLISWDDYASNSHTIPSDQTSFDVTIPSDLGSECATAGDCVIQWYWNAESIDQTYESCVDFTVSGSGSGSGSGSGSGSSTAQPTTTAAPTTTTSASAVVTQTATPTTSIQAEASTTTSAVPTSTALPETFTLDTFIDWLRAEAGSSNARRLARHHARQIRPMRN

SEQ ID NO: 62 - protein, 261 aa, Colletotrichum tofieldiae
  >KZL64112.1 chitin binding protein [Colletotrichum tofieldiae]
MQSKIVTVLSFVAAVSAHGKVTSPTPRPAGDAFKEACGTTMWNTEQSDPYGNIQGLAQQAGSSLDASKCQLELCKGYKFADNSANVQSYTPGQTVDFKVEIRAPHTGVANVSVVDTTSNSIIGSPLISFENYASTKTGVAANNTAFSVTLPDTLPANCGTAGNCVLQWWWDSAEAGQTYMSCVDFTSGGSGSGTGSGSPTPSAAPTTLLTSAVPSATPSTPATGGSDESSDPVATPSATPSEPASSCTKRRAAKRALRKRF

SEQ ID NO: 63 - protein, 259 aa, Colletotrichum incanum
  >OHW96265.1 chitin binding protein [Colletotrichum incanum]
MQSKIVTVLSFVAAVSAHGKVTSPTPRPAGDAFKEACGNTMWNTEQSDPYGNIQGLAQQAGSSLDASKCQLELCKGYKFADNSANVQSYTPGQTVDFKVEIRAPHTGVANVSVVDTTSNSIIGSPLISFENYASTKTGVAANNTAFSVTLPDTLPSNCGTAGNCVLQWWWDSAEAGQTYMSCVDFTSGGSGTGSGSPTPSAAPTTLLTSAVPSATPSTPATGASDESSDTVATPSATPSEPASSCNKRRAAKRALRKRF

SEQ ID NO: 64 - protein, 315 aa, Penicillium camemberti
  >CRL24899.1 Chitin-binding, domain 3 [Penicillium camemberti]
MKNFTPALAFASIISLVNAHGFVTKPEARQPGTAMGAACGQQVLSNQGSDKYGNIQGELQVAASQSDYNAAECDIWLCKGYKFADNKDNVQSYTAGQKVPFTVDIRAPHTGVANVSVVATASNKVIGAPLISWDVYASTATGVTADETSFSVTIPDGLGSQCATAGDCVLQWYWYAESIDQTYESCVDFTVGGSGSASAASSASSASSTSSTSSATEIAVTSTPSPAVQTPTTTAAESTTAPTTAAAEPTSSSTVAAQPTTFATTARPSATSAAAQVPTSSAAPSASASALPFSTGSASDVLSWLEALLGNLVGN

SEQ ID NO: 65 - protein, 194 aa, Glonium stellatum
  >OCL05568.1 hypothetical protein AOQ84DRAFT_298674 [Glonium stellatum]
MHFSLASFLTTATFVGTAWSHGIITTPAPRAVGAASLAACGSGVTKLIRADNTSHVEGLPEIAATDNAYKAADCNLWLCKGLQLADNKANVQNFTAGQTLDMLIWIRIPHAGTANVSVVDTKTNQVIGEPLISFRDYADQSLPTLPKNNTNFSVTIPKGLEKRCATAGQCILQWYWYGVAAKQTYESCVDFIIV

SEQ ID NO: 66 - protein, 259 aa, Colletotrichum incanum
  >KZL79123.1 chitin binding protein [Colletotrichum incanum]
MQSKIVTVLSFVAAVSAHGKVTSPTPRPAGDAFKEACGNTMWNTEQSDPYGNIQGLAQQAGSSLDASKCQLELCKGYKFADNSANVQSYTPGQTVDFKVEIRAPHTGVANVSVVDTTSNSIIGSPLISFENYASTKTGVAANNTAFSVTLPDTLPSNCGTAGNCVLQWWWDSAEAGQTYMSCVDFTSGGSGTGSGSPTPSAAPTTLLTSAVPSATPSTPATGASDESSDPVATPSATPSEPASSCNKRRAAKRALRKRF

SEQ ID NO: 67 - protein, 210 aa, Pyrenophora tritici-repentis
  >XP_001932539.1 conserved hypothetical protein [Pyrenophora tritici-repentis Pt-1C-BFP]
MHFTTTSLLALAVPTVLGHGLITSPPSRPVGPAIIKNCGPKVEQDIRLDNTSHVEGLPELAAQDPAYNATSCNLFLCKGLQFADNPANHTQMWTAGQVVPIKVWIRIPHEGSANVSIVDTKTNTIVGEMLKVWKSGYAPGSKESDVPADQKEFSVTVPEGLEEKCKSAGDCVLQWWWYGLSAKQTYESCVDFMVMKKGVRRDAFARAFAG

SEQ ID NO: 68 - protein, 205 aa, Rhynchosporium commune
  >CZS93624.1 related to chitin binding protein [Rhynchosporium commune]
MLFSFNSILAVTSMVGAVAGHGIITKPWPRAPGAASLAACGPNVTNNIKGDNTSHVEDLPEAGALDPKYHADKCNLWLCRGLQYADNKEHVVSYKAGQKVDMEVYLRIKHFGSANVSIVDTKTNKIISPNLVYWAKYADEKKATVPAEEKFSFKIPKNLGSKCATAGDCVIQRWWYGTGAKQTYESCVDFTVAAPMVMNKRFRRV

SEQ ID NO: 69 - protein, 210 aa, Pyrenophora teres
  >EFQ94413.1 hypothetical protein PTT_07889 [Pyrenophora teres f. teres 0-1]
MHFTTTSLLALAVPTVLGHGLITSPPSRPVGPAIIENCGPKVEQDIRLDNTSHVEGLPELAAKDPAYNATSCNLFLCKGLQFADNPSNHTQMWTAGQVVPIKVWIRVPHEGSANVSIVDTKTNTIVGEMLKVWESGYAPGSKESDVPVDQKEFTVTVPEGLEERCKSAGDCVLQWWWFGNSAKQTYESCVDFKIMKKGVKRDAFARAFAG

SEQ ID NO: 70 - protein, 303 aa, Penicillium griseofulvum
  >KXG50642.1 Chitin-binding, domain 3 [Penicillium griseofulvum]
MKHFTSALALASIVSLVNGHGFVTSPKARQPGTAMEAACGKQVVSNQGSDKYGNIQGELQVASNQNDYKAAECDIWLCKGYKFDDNKDNVYSYKAGQKVDFTVDIRAPHTGIANVSVVDTSSNTVIGAPLISWDSYASTATGVKPDETKFSITMPDNLQDKCATAGACVLQWYWFAQSIDQTYESCVDFTLGGSGFSAGSGPVPSQKASSVDSATNVGTTTTSTGTVAAQPTTTADAQSTTAAAKPTTTFATSTRQPASSAAPVPTSAAASPAGSDPAVPFPTDSAADVLAWLQAMFGNLAGN

SEQ ID NO: 71 - protein, 284 aa, Aspergillus sydowii
  >OJJ62895.1 hypothetical protein ASPSYDRAFT_145302 [Aspergillus sydowii CBS 593.65]
MKQATSILAAAGLISLANAHGYITTPKPRLPGIAMSSACGEQIYNNQKADRAGNVQGELQIGAGQEDYNEEACHIWLCKGYQFEDNKDNVQQYSAGQTVDFVVDILAPHTGVANVSVVDTSSNSVIGEPLKSWAKNYASTETGVSEDDTNFSVTIPENLDGKCSEAGACVLQWYWFAESIDQTYESCVDFTVGGGGSGSGSGSGSSSSSSSSSSGSGASTTSAPAETQTAVNKVIDVPTTLSTATRPAETATGTAQATAVPAEGSSDEQMNWLSSIFKAVTSRQ

SEQ ID NO: 72 - protein, 308 aa, Penicillium arizonense
  >XP_022490347.1 hypothetical protein PENARI_c005G10076 [Penicillium arizonense]
MMKQFTPVLAFASMISMVNAHGFVTSPQARMPGSAMAAACGNQVQVNQQSDNYGNIQGELQVASSQSDYNAAECDIWLCKGYKFADNKDNVQSYTAGQKVDFKVDIRAPHTGVANVSVVDTSSNSVIGQPLISWDIYASTATGVTSDETSFSVTIPDGLGSQCGTAGDCVLQWYWYAESIDQTYESCVDFTLGGDSSSSGSSGSSSSAVVSSAPATSATAVAATTSAATTSAATTSAAIAIETSISAPVAAQTTFATSARQSASPSEAPSSVVATASAAGSALPFPTDSAESVLSWVESLLGNLVGSN

SEQ ID NO: 73 - protein, 205 aa, Pseudogymnoascus
  >KFZ04137.1 hypothetical protein V502_10381 [Pseudogymnoascus sp. VKM F-4520 (FW-2644)]
MQYLSLATLVGIATTVSSHGVITSPSPRIAGAASLAACGTAVTLLYKQDVTDHVEGLPEVAAVDSTYNADECNLWLCKGLQLDEEASGAVQTYSPGQVVPIEVYLRILHAGTANVSIVDTASNTVVGSELLYWDSYADEKKPTVPENNTLFSVTIPSDIEEGKCTTAGECVIQWWWFGVGAKQTYESCVDFVLAPGTPSNGTRRN

SEQ ID NO: 74 - protein, 188 aa, Hydnomerulius pinastri
  >KIJ68283.1 hypothetical protein HYDPIDRAFT_24577 [Hydnomerulius pinastri MD-312]
MMSKLVTLIAAASVLSSALAHGVISSPQRRLPGAAFEAACGTQIYDLVESDQFGNQQQEEQNIGSDTTSACQLYLCKGLMYADNESNVQKYTANQVVPIEIDLEAPHTGVANVSVVDTTTNSVIGSPLIYFDPAYSVSTPIPANQTSFSVTIPDLGTQCATAGVCVLQWWWDARSIDQTYMSCVDFTQ

SEQ ID NO: 75 - protein, 185 aa, Clohesyomyces aquaticus
  >ORY19044.1 hypothetical protein BCR34DRAFT_472488 [Clohesyomyces aquaticus]
MHASTLFSSTLFVATVLAHGNVTSPPSRQPGAAMASVCGAAAVSAILADGTGPLENIPSNGAAKCNIFMCKGAQFADNQANVQEFTAGQVVDFEVQLPIPHEGPANVSIIDTATNTVVGDPLIEFDTYADEALATLPANNTAFSVTVPANLGGKCEVAGECVMQWFWLGTAARQTYENCVDFVVV

SEQ ID NO: 76 - protein, 297 aa, Microdochium bolleyi
  >KXJ97354.1 chitin binding domain-domain-containing protein [Microdochium bolleyi]
MISNTQTLFTLASLATTVLGHGYVMSPPARKPGPAMAAACGQQMFYNQNSDFYGNVQGELQVANNQADYNAAACNVWQCKGYKLADNTANVQTFTAGQVVPMTVEIRAPHEGTANVSIVSTKANRIIGQPLISWAKYASNSAPIPADQTKFDITIPADIGGQCATAGDCVIQWYWDARSIDQTYEACVDFTVAGSGGGAVGGGGGSSTAPPTPVTSSRPVASPTATATAAATQAPVTTTRPSAVPSSTPQPPPSTGGGSGSGDLPESFTLDTFITWLRSQAGRTGGRSARRHARDMM

SEQ ID NO: 77 - protein, 204 aa, Clohesyomyces aquaticus
  >ORY17335.1 hypothetical protein BCR34DRAFT_622010 [Clohesyomyces aquaticus]
MHFSAAALLALVPAVLGHGLIQEPPSRPVGSAIVSYCGNGVVTQIKQDNTSHVEGLPEAAAKDKAYQAAKCNLWLCKGLQFADNPSANIQKWTAGQVVPIKVWVRIPHEGSANVSIVDTKSNKVVGEMLKVWSKGYAPGYTESGVPKDQKEFSVTIPSGLEEKCATAGDCVLQWWWYGVSAKQTYESCVDFTIAKPAVKKAFKA

SEQ ID NO: 78 - protein, 264 aa, Colletotrichum orchidophilum
  >XP_022473436.1 hypothetical protein CORC01_08494 [Colletotrichum orchidophilum]
MQSNILTVLSFVAAVSAHGKVTSPTPRSAGDAFKAACGDTMWNTEQADPYGNIQGLANQAGSSLDPTKCELYQCKGYKFADNTANVQSYTPGQTVDFKVEIRAPHTGVANVSVVDTTANSIIGSPLISFTNYASTKTGVAANNTAFSVTLPNSLPATCGTAGNCVLQWWWDSAEAGQTYMSCVDFTSGSGSGSAAPAPAPSAAAPSAAAPTTLVTSAIASATPSAPAAGSSDQTADPVAATPSATPSSPSPCKRNAKRALRKRF

SEQ ID NO: 79 - protein, 258 aa, Colletotrichum salicis
  >KXH56423.1 hypothetical protein CSAL01_13527 [Colletotrichum salicis]
MQSNILTVLSFVAAVSAHGKVTSPTPRPAGDAFKEACGTTMWNTEQSDPYGNIQGLAQQAGSSLDASKCELALCKGYKFADNSANIQSYTAGQTVDFKVEIRAPHTGVANVSVVDTTSNSIIGSPLISFTNYASTKTGVAANNTAFSVTLPDSLPSNCGTAGNCVLQWWWDSAEAGQTYMSCVDFTSGSGSGTGSGSATPSAAPTTLVTSAVASATPSTPASGSSDQAADPVSATPSATPSSSAPCKRNAKRALRKRF

SEQ ID NO: 80 - protein, 196 aa, Marssonina brunnea
  >XP_007293961.1 hypothetical protein MBM_06072 [Marssonina brunnea f. sp. 'multigermtubi' MB_m1]
MYSSTPILHLAAFASTVLAHGNIISPPARVVGPAMDAACGKSVANLVRADITSHIEDMPEALALEKDTDPAGCNVFLCRGQQFADNKANVQNYTAGQVVNMRAVLPIPHEGPMNVSIVDTATNRVIGAPLISFDSYADESLAELPANNTNFNVTVPSDMGTNCTEAGACVMQWFWFGTSAKQTYESCVDFMMTDAA

SEQ ID NO: 81 - protein, 216 aa, Glarea lozoyensis
  >XP_008085554.1 hypothetical protein GLAREA_04986 [Glarea lozoyensis ATCC 20868]
MLSTIILAGLATSISAHGVITSPPVRAVGQAMIDNCGASVAALVQADVTSHVEDMPEAAALIPGFNATACPLFLCKGLQFEDNVANVQEFAPGEVVNMKAILPIPHEGPMNVSIIDTATNTAIGQPLIEFASYADESLAVLPANNTDFDVTIPTTLGAKCAVAGACVMQWFWFGTGAQQTYESCVDMVVPAAAAAVVPNTAVAVPNAAVVATPLRC

SEQ ID NO: 82 - protein, 276 aa, Aspergillus clavatus
  >XP_001268817.1 chitin binding protein, putative [Aspergillus clavatus NRRL 1]
MKQTGTLMALAGLVSMVHGHGFVTSPKARMPGPAMKAACGNQVEINQQSDNYGNIQGELQVAKSQSDYNAEACNIWLCKGYKFDDNKDNVNSYTAGQKVDFTVDIRAPHTGVANVSVVDTTTNTVIGETLKSWTNYASTATGVSADETNFSVTIPDNLGGKCSEAGACVLQWYWFAESIDQTYESCIDFTVSGSGSGSGSGSTPSAPATSSSAAVTAAPTAAPTQATTMVTSVKQTSTAAAPSATAPSTSFPTDGSAEEKLTYIASLLQGLMKYLG

SEQ ID NO: 83 - protein, 287 aa, Aspergillus wentii
  >OJJ34996.1 hypothetical protein ASPWEDRAFT_171825 [Aspergillus wentii DTO 134E9]
MKQTGSILALAGLVSMAHGHGFVTTPQARMPGSAMKAACGQQVEINQQSDNYGNVQGELQVANSQSDYNAEKCDIFLCKGYKFADNKDNVQSYTAGQKVDFVVDIRAPHTGVANVSVVDTSSNSVIGDALKSWDSYASTATGVTEDDTNFSVTIPDGLDSKCSTAGACVLQWYWYAESIDQTYESCVDFTVGGSGSGSGSSGSSSASSSTQASVAITTSANAGNNVASQPTTLATSARQTPSSAPAVASSAAPAASSSASDYAIPKNGSDEEKLSWVSSLLKALVKF

SEQ ID NO: 84 - protein, 299 aa, Aspergillus brasiliensis
  >OJJ74340.1 hypothetical protein ASPBRDRAFT_39472 [Aspergillus brasiliensis CBS 101740]
MKQAGSILALAGLVSLAQGHGFVTSPQARMPGSAMEKACGQQVYNNQKADNYGNVQGELQIASGQSDYDADACDIWLCKGYKYADNTDNVYSYKAGETVDFTVDIRAPHTGTANVSVVDTASNTVIGSPLIYWSVYASTATGVTANETSFSVTIPDDLGDKCTEGGACVLQWWWNAASIDQTYESCIDFTVGGSGSSSSSSSSSSSSSSVAASQPTTTSTTAAAAVTTPSTANNIAPASSSVPTTLATSVKQSATVAPVAASSAAASASSSVSIPTDGTAEEQLTWVASLLKALLKYAN

SEQ ID NO: 85 - protein, 183 aa, Lomentospora prolificans
  >PKS10980.1 hypothetical protein jhhlp_002739 [Lomentospora prolificans]
MKYTVVAVASLATLVSAHGNITSPPARLAGASMAAACGQAAVDAVNADGTIPLENITPETGDCNLFLCRGATFDDNVDLVQTFTPGQVVDFTAILPIPHEGPCNVSVVDTATNSVIGDPLIEFESYADENLPELPANNTAFSVTIPQLDAGLCTVAGECVLQWFWFGTGAQQTYESCVDFVLA

SEQ ID NO: 86 - protein, 188 aa, Jaapia argillacea
  >KDQ56222.1 hypothetical protein JAAARDRAFT_305591 [Jaapia argillacea MUCL 33604]
MFIKLSTLLTALAVASTAVAHGVISSPPRRRPGTNFSSVCGSQIYSIVSSDEYGNQQGEEQNINSGTTAACHLYLCKGLQFSDNTANVQHYPANTVVPITIDLRAPHTGVANVSVVATATNKVIAGPLISFNPAYSVSTPIPANQTSFSVTIPSLSGQCGTAGACVIQWWWDARSIDQTYMSCVDFTQ

SEQ ID NO: 87 - protein, 261 aa, Colletotrichum gloeosporioides
  >EQB56985.1 hypothetical protein CGLO_02950 [Colletotrichum gloeosporioides Cg-14]
MQSKIVTVLSFAAAVSAHGKVTSPTPRVAGDAFKEACGTTMWNTEQSDPYGNIQGLAQQAGSSLDASKCELALCKGYKFADNTNVQSYSPGETVDFKVEIRAPHTGVANVSVVDTTSNSVIGEPLISFTNYASTKTGVAANNTAFSVTLPDSLPSNCGTAGNCVLQWWWDSAEAGQTYMSCVDFTSGSGSGSGSGSTTPAASAAPTTLATVATPSATPSTPASGNSGASDESAATPSATPSAPASSCNKRRSSKRALRKRF

SEQ ID NO: 88 - protein, 262 aa, Colletotrichum gloeosporioides
  >ELA28006.1 chitin binding protein [Colletotrichum gloeosporioides Nara gc5]
MQSKIVTVLSFVAAVSAHGKVTSPTPRVAGDAFKEACGTTMWNTEQSDPYGNIQGLAQQAGSSLDASKCELALCKGYKFADNTNIQSYSPGETVDFKVEIRAPHTGVANVSVVDTTSNSVIGEPLISFTNYASTKTGVAANNTAFSVTLPDSLPSNCGTAGNCVLQWWWDSAEAGQTYMSCVDFTSGSGSGSGSSGSTTPAASAAPTTLATVATPSATPSTPASGNSGASDESAATPSATPSAPASSCNKRRSSKRALRKRF

SEQ ID NO: 89 - protein, 188 aa, Jaapia argillacea
  >KDQ56223.1 hypothetical protein JAAARDRAFT_305662 [Jaapia argillacea MUCL 33604]
MFVKLSAVVTALALAGTTVAHGVISSPPRRQPGANFTAVCGSQIDSIVSSDQYGNQQLEEQNINSQTTAACHLYLCKGLQYADNTANVQHYPANTVVPITIDIRAPHTGVANVSVVATATNKVIAGPLISFNPAYSVSAPIPANQTSFSVTIPNLNGQCATAGACVLQWWWDARSVDQTYMSCVDITQ

SEQ ID NO: 90 - protein, 206 aa, Parastagonospora nodorum
  >XP_001805060.1 hypothetical protein SNOG_14889 [Parastagonospora nodorum SN15]
MQFTVAALLTIVPAVLGHGLIQSPPSRPVGPAIIANCGPKVEQDIRLDNTSHVEGLPELAAKDTAYNAEKCNLWLCKGLQFADNMNNTQTWHAGQVIPLKVWVRIPHEGSANVSIVDTQTNEIVGDMLKVWSEGYAPGKKESDVPEDQKVFSVTVPEGLETRCATAGACVLQWWWYGNSARQTYESCVDFKIANKTMPRRRASFRA

SEQ ID NO: 91 - protein, 300 aa, Penicillium vulpinum
  >OQE00174.1 hypothetical protein PENVUL_c057G01042 [Penicillium vulpinum]
MKHFTSALAFASIVSLVNGHGFVTNPKARQPGTAMQDACGAQVVSNQGSDKYGNIQGELQVASGQSDYQAAECDIWLCKGYKFDDNKDNVYSYKAGEKVDFTVDIRAPHTGVANVSVVDTSSNTVISSPLISWSDYASVATGVKADETSFSITMPDDLEDQCVTAGDCVLQWYWYAQSIDQTYESCIDFTLGGSGSSGGAAPVPSSKASSTSSATVAAPTTTAAPTVIVQPTTTVPAQPTTTFATSVRQSATSAGVSAPTTAPASPDTTDTADDALPFPTDSAADVLAWLQAMFGTLVGN

SEQ ID NO: 92 - protein, 205 aa, Pseudogymnoascus
  >KFY90988.1 hypothetical protein V500_04852 [Pseudogymnoascus sp. VKM F-4518 (FW-2643)]
MQYLSLATLVGIATTVSSHGVITSPSPRIAGAASLAACGTAVTLLHKQDVTDHVEGLPEVAAVDSTYNADECNLWLCKGLQLDEEASGAVQTYSPGQVVPIEVYLRILHAGTANVSIVDTASNTVVGSELLYWDSYADEKLPTVPENNTLFSVTIPSDIEEGKCTTAGECVIQWWWFGVGAKQTYESCVDFVLAPGTPSNGTRRN

SEQ ID NO: 93 - protein, 363 aa, Pseudomassariella vexata
  >ORY58241.1 hypothetical protein BCR38DRAFT_78771 [Pseudomassariella vexata]
MKSYIISAVIPLVAGHGYITSPQPRVVGSAMEEACGTQIYNQLKSDINGNIQGEIQNKQDDFTDACNLWLCKGLQFADNTANVQSYNAGDVVDVVYDIRAPHTGVANVSIVDTATNAVIGEPLISWDVFASTSTGVTADETNFSITIPDLAGKCTTAGECVIQHYWNAADVDQTYEACIDFTVGGSSSGGAASSAPASSIPASSTPASSAAPTSAAATTTAPVVTSAAPVATESAVAEDECVADEPTATTSAAAVEETGADDECEAETSAVAVEGAATSSPAATPATDDDTSCDADDTTAVASAVPTTFLTRTATSAAAAATSAAASAAAAYAQCGGTGFTGSTTCVSGYTCTVQNSYYSQCI

SEQ ID NO: 94 - protein, 305 aa, Penicillium coprophilum
  >OQE46480.1 hypothetical protein PENCOP_c001G07033 [Penicillium coprophilum]
MKHFAPALAFASIISLVNGHGFVSSPKARQPGTAMEAACGKQVVSNQGSDKYGNIQGELQVASSQDDYEAAACDIWICKGYKFADNKDNVYSYKAGQKVDFTVDIRAPHTGVANVSVVDTSSNTVIGAPLISWSVYASVATGVKANETSFSVTMPDDLEDQCVTAGDCVLQWYWYAQSIDQTYESCIDFTLGGSGSGGVSAPAPSVKASSIGSSTDVATIATATNPATTGAVQPTTTADAKPTTTIAAQPTTTFATSARQSATSAELPVATSTAATTSAAMAFPTDSAADVLAWIQAIFGNLAGN

SEQ ID NO: 95 - protein, 206 aa, Stagonospora
  >OAL01105.1 hypothetical protein IQ06DRAFT_316132 [Stagonospora sp. SRC1lsM3a]
MQFTIAALLALAPAVLGHGLITSPPARPIGSALIKNCGPKVEQDIRLDNTSHVESRPELAAKDPAYNPAKCNLWLCTGLQFADNANNTQEWHAGQVVPVKVWIRIPHEGSANVSIVDTKTDKIVGDMLKVWSKGYAPGKKESDVPADQKEFSVTIPEGLEEKCATAGDCVLQWWWYGTAARQTYESCVDFKIVKKTMPMRRAAFRA

SEQ ID NO: 96 - protein, 205 aa, Pseudogymnoascus
  >OBT66274.1 hypothetical protein VE03_04359 [Pseudogymnoascus sp. 23342-1-I1]
MQYLSLATLVGIATTVSSHGVITSPSPRIAGAASLAACGTAITLLHKQDVTDHVEGLPEVAAVDSTYNADECNLWLCKGLQLDEEASGPVQTYSPGQVVPIEVYLRILHAGTANVSIVDTASNTVIGSELLYWDSYADETLPAVPENNTLFSVTIPSDIEEGKCTTAGECVIQWWWYGVGARQTYESCVDFVLAPGAPSNGTTRN

SEQ ID NO: 97 - protein, 288 aa, Aspergillus oryzae
  >EIT82790.1 chitin binding protein [Aspergillus oryzae 3.042]
MKQTGTILALAGLVSMAHGHGFVTSPKARMPGTAFQEACGQQMYNNQQADNYGNVQGELQIASSQNDYDAAKCNAWLCKGYKFDDNKDNVFQYTPGQNVDFTVDIRAPHTGVANVSVVDTASNTVIGEALKSWDVYASTESGVKETDKKFSVTLPSDLGSKCSEAGACVLQWYWFAESIDQTYESCIDFTMSGSGSGSSSGASSGASSAASTAAATASSTATGVAVTATPTTGNNVAAPSGFATSAKPSATSAPSSAASTVTIPTDGTAEEKLNWIASLLQTLVKYTA

SEQ ID NO: 98 - protein, 288 aa, Aspergillus oryzae
  >XP_001826012.1 unnamed protein product [Aspergillus oryzae RIB40]
MKQTGTILALAGLVSMAHGHGFVTSPKARMPGTAFQEACGQQMYNNQQADNYGNVQGELQIASSQNDYDAAKCNAWLCKGYKFDDNKDNVFQYTPGQNVDFTVDIRAPHTGVANVSVVDTASNTVIGEALKSWDVYASTESGVKETDKKFSVTLPSDLGSKCSEAGACVLQWYWFAESIDQTYESCIDFTMSGSGSGSSSGASSGASSAASTAAATASSTATGVAVTATPTTGNNVAAPSGFATSAKPSATSAPSSAASTVTIPTDGTAEEKLNWIASLLQTLVKYIA

SEQ ID NO: 99 - protein, 289 aa, Aspergillus flavus
  >XP_002377659.1 chitin binding protein, putative [Aspergillus flavus NRRL3357]
MKQTGTILALAGLVSMAHGHGFVTSPKARMPGTAFQEACGQQMYNNQQADNYGNVQGELQIASSQNDYDAAKCNAWLCKGYKFDDNKDNVFQYTPGQNVDFTVDIRAPHTGVANVSVVDTASNTVIGEALKSWDVYASTESGVKETDKKFSVTLPSDLGSKCSEAGACVLQWYWFAESIDQTYESCIDFTMSGSGSGSSSGASSGASSSAASTAAATASSTATGVAVTATPTTGNNVAAPSGFATSAKPSATSAPSSAASTVTIPTDGTAEEKLNWIASLLQTLVKYTA

SEQ ID NO: 100 - protein, 291 aa, Penicillium italicum
  >KGO75620.1 Chitin-binding, domain 3 [Penicillium italicum]
MKNFTPALAFASMISLVNAHGFVTSPPARQPGTAMGAACSQQVLSNQSADKYGNIQGELQVAATQSDYNAAECDIWLCKGYKLADNKDNVQSYQAGEKVDFKVDIRAPHTGVANVSVVTTASNKVIGAPLISWDVYASTATGVKPNQTSFSVTIPDDLGSQCVTAGECVLQWYWYAQSIDQTYESCVDFTIGGSGPAPAASSVAVATTPIGAVQTPATAAAQSPTSSTTVVAQPTTFATTARPPATSAAAQVPTTASVEPSTSASALPFPTDSASDVLSWLEALLGNLVGN

SEQ ID NO: 101 - protein, 205 aa, Pseudogymnoascus
  >KFY50962.1 hypothetical protein V496_09042 [Pseudogymnoascus sp. VKM F-4515 (FW-2607)]
MQYLSLATLVGIATTVSSHGVITSPSPRIAGAASLAACGTAVTLLHKQDVTDHVEGHPEVAAVDPTYNADECNLWLCKGLQLDEEASGPVQTYSPGQVVPIEVYLRILHAGTANVSIVDTASNTVVGNELLYWDSYADETLPTVPENNTLFSVTIPSDIEEGKCTTAGECVIQWWWYGVGAKQTYESCVDFVLSPGAPSNGTRRN

SEQ ID NO: 102 - protein, 205 aa, Pseudogymnoascus
  >KFY29942.1 hypothetical protein V493_02187 [Pseudogymnoascus sp. VKM F-4281 (FW-2241)]
MQYLSLATLVGIATTVSSHGVITSPSPRIAGAASLAACGTAVTLLHEQDVTDHVEGHPEVAAVDPTYNADECNLWLCKGLQLDEEASGPVQTYSPGQVVPIEVYLRILHAGTANVSIVDTASNTVVGSELLYWDSYADETLPTVPENNTLFSVTIPSDIEEGKCTTAGECVIQWWWYGVGAKQTYESCVDFVLAPGAPSNGTRRN

SEQ ID NO: 103 - protein, 298 aa, Aspergillus luchuensis
  >GAT23211.1 chitin binding protein [Aspergillus luchuensis]
MKQAGSILALAGLVSLAQGHGFVTSPQARMPGSAMEKACGQQVYNNQEADNYGNVQGELQIASGQSDYDADACDIWLCKGYKYADNKDNVYSYKAGETVDFTVDIRAPHTGTANVSVVDTASNTVIGSPLIYWSVYASTSTGVTANETSFSVTIPDDLGDKCTEGGACVLQWWWNAASIDQTYESCIDFTVGGSGSSSSSSSSSSSSSAAASQQTTTTAAAAAVTTPSTANNVAPASSSVPTTLATSVKQSATVAPVAASSAAAAASSSGVSIPTDGTAEEQLTWVASLLKALLKYAN

SEQ ID NO: 104 - protein, 299 aa, Aspergillus kawachii
  >GAA86690.1 chitin binding protein [Aspergillus kawachii IFO 4308]
MKQAGSILALAGLVSLAQGHGFVTSPQARMPGSAMEKACGQQVYNNQEADNYGNVQGELQIASGQSDYDADACDIWLCKGYKYADNKDNVYSYKAGETVDFTVDIRAPHTGTANVSVVDTASNTVIGSPLIYWSVYASTSTGVTANETSFSVTIPDDLGDKCTEGGACVLQWWWNAASIDQTYESCIDFTVGGSGSSSSSSSSSSSSSSAAASQQTTTTAAAAAVTTPSTANNVAPASSSVPTTLATSVKQSATVAPVAASSAAAAASSSGVSIPTDGTAEEQLTWVASLLKALLKYAN

SEQ ID NO: 105 - protein, 296 aa, Aspergillus steynii
  >XP_024703642.1 putative chitin binding protein [Aspergillus steynii IBT 23096]
MKTTGSIMALAGLVSMAHGHGFVTSPKPRMPGSAMESACGQQVKTNQEADNYGNIQGELQVASGQDDYDDAKCDIWLCKGYKFADNKDNIYSYKAGQKIDFEVDIRAPHTGVANVSVVDTSSHSVIGSPLKSWDEYASTSTGVKDTETSFSITMPDDLGDKCTEAGACVLQWYWFAESIDQTYESCVDFTLGGSGSGSGSSGSGSSSSAASGAASTTAPVAITTTPSTGNQVVSSAAPTTLATSAKQAATTEAAPAASTTAAASDSSVTGIPKDGSAEEQLTFVASLFKSLLEYAN

SEQ ID NO: 106 - protein, 205 aa, Pseudogymnoascus verrucosus
  >XP_018128709.1 hypothetical protein VE01_07444 [Pseudogymnoascus verrucosus]
MQYLSLATLVGIATTVSSHGVITSPTPRIAGAVSRAACGTAITLLHKQDVTDHVEGMPQVAAVDSTYHADECNLWLCKGLQLDEEASGPVQTYSPGQVVPIEVYLRILHAGTANVSIVDTASNTVVGSELLYWDSYADEKLPAVPANNTLFSVTIPSDIEEGKCTTAGECVIQWWWYGVGARQTYESCVDFVLAPTAPSSRIRRN

SEQ ID NO: 107 - protein, 300 aa, Aspergillus tubingensis
  >OJI85015.1 hypothetical protein ASPTUDRAFT_189100 [Aspergillus tubingensis CBS 134.48]
MKQAGSILALAGLVSLAQGHGFVTSPQARMPGSAMEKACGQQVYNNQEADNYGNVQGELQIASGQSDYDADACDIWLCKGYKYADNKDNVYSYKAGETVDFTVDIRAPHTGTANVSVVDTASNTVIGSPLIYWSVYASTATGVTANETSFSVTIPDDLGDKCTEGGACVLQWWWNAASIDQTYESCIDFTVGGSGSSSSSSSSSSSSSSSAAASQQSTTTAAAAAVTTPSTANNVAPASSSVPTTLATSVKQSATVAPVAASSAAAAASSSGVSIPTEGTAEEQLTWVASLLKALLKYAN

SEQ ID NO: 108 - protein, 300 aa, Aspergillus niger
  >GAQ36085.1 chitin binding protein [Aspergillus niger]
MKQAGSILALAGLVSLAQGHGFVTSPQARMPGSAMEKACGQQVYNNQEADNYGNVQGELQIASGQSDYDADACDIWLCKGYKYADNKDNVYSYKAGETVDFTVDIRAPHTGTANVSVVDTASNTVIGSPLIYWSVYASTATGVTANETSFSVTIPDDLGDKCTEGGACVLQWWWNAASIDQTYESCIDFTVAGSGSSSSSSSSSSSSSAAASQQTTTTAAAAAVTTPSTANNVAPASSSVPTTLATSVKQSATVAPVAASSAAAAAAAASSGVSIPTDGTAEEQLTWVASLLKALLKYAN

SEQ ID NO: 109 - protein, 288 aa, Aspergillus parasiticus
  >KJK61093.1 Chitin binding domain protein [Aspergillus parasiticus SU-1]
MKQTGTILALAGLVSMAHGHGFVTSPKARMPGTAFQEACGQQMYNNQQADNYGNIQGELQIANGQNDYDAAKCNAWLCKGYKFDDNKDNVFQYTPGQNVDFTVDIRAPHTGVANVSVVDTASNTVIGEALKSWDVYASTETGVKETDKKFSVTLPSDLGSKCSEAGACVLQWYWFAESIDQTYESCVDFTMSGSGSGSSSGSSSSASSAASTAAATASSTATGVTVTATPTTGNNVAAPSGFATSAKPSATSAPSSAASTVTIPTDGTAEEKLNWIASLLQTLVKYTA

SEQ ID NO: 110 - protein, 339 aa, Penicillium digitatum
  >XP_014530823.1 putative secreted cellulose-binding protein [Penicillium digitatum Pd1]
MKNFTPALAFASVISFVNAHGFVTSPAARQPGLAMGAACGQQVLSNQAADKYGNIQGELQVAATQDDYNAAECDIWLCKGYKFDDNKDNVHSYKAGETVDFQVDIRAPHTGVANVSIVSTAFNKVIGTPLIYWDVYASTATGVKPNQTSFSITIPEDIGSQCATANDCVLQWYWYAESIDQTYESCVDFTVSEFSSTPAAPSKAVSASSSALVTATSSKAVSESSSASVASSKAWSSKALSKASSTPSATEIAVTTVPSGAVRTPTTAAVKSTTPATKVSARPTTFATTARRSATSAAAHVHTASAEPSTSASAVPFPTDSASDVLAWIEAMLGNLVGN

SEQ ID NO: 111 - protein, 288 aa, Aspergillus arachidicola
  >PIG80141.1 chitin binding protein [Aspergillus arachidicola]
MKQTGTILALAGLVSMAHGHGFVTSPKARMPGTAFQEACGQQMYNNQQADNYGNIQGELQIANGQNDYDAAKCNAWLCKGYKFDDNKDNVFQYTPGQNVDFTVDIRAPHTGVANVSVVDTASNTVIGEALKSWDVYASTETGVKETDKKFSVTLPSDLGGKCSEAGACVLQWYWFAESIDQTYESCVDFTMSGSGSGSSSGSSSSASSAASTAAATASSTATGVTVTATPTTGNNVAAPSGFATSAKPSATSAPSSAASTVTIPTDGTAEEKLNWIASLLQTLVKYTA

SEQ ID NO: 112 - protein, 286 aa, Aspergillus turcosus
  >OXN18384.1 hypothetical protein CFD26_03541 [Aspergillus turcosus]
MKQTGTLVALAGLVSMVHGHGFVKSPQARMPGPAMKAACGNQVEINQQSDNYGNIQGELQVARSQSDYNAEACDIWLCKGYKFADNKDNVYSYTAGQTVDFVVDIRAPHTGVANVSVVDTATNTVIGNTLKSWTDYASTATGVSQDETNFSITIPDNLGSQCSEAGACVIQWYWYAESIDQTYESCIDFTVGGSGSSSSGSSSSSGSGSSVPSATSIAVTTPSTGNYAVSSTPTTMVTSVKQVPTSAPAAGTGAAGSSASFPTSGTSEEQLSFLAALMKSLMQYVA

SEQ ID NO: 113 - protein, 280 aa, Aspergillus turcosus
  >OXN36496.1 hypothetical protein CDV55_04316 [Aspergillus turcosus]
MKQTGTLVALAGLVSMVHGHGFVKSPQARMPGPAMKAACGNQVEINQQSDNYGNIQGELQVARSQSDYNAEACDIWLCKGYKFADNKDNVYSYTAGQTVDFVVDIRAPHTGVANVSVVDTATNTVIGNTLKSWTDYASTATGVSQDETNFSITIPDNLGSQCSKAGACVIQWYWYAESIDQTYESCIDFTVGGSGSSGSGSSSSAPSATSLAVTTPTTGNYVVSSTPTTIVTSVKQVPTSASTASAGAAGSSASFPTSGTSEEQLSFFAALMKSLMQYAA

SEQ ID NO: 114 - protein, 225 aa, Phellinus noxius
  >PAV18184.1 chitin binding protein [Phellinus noxius]
MFASALVSLLLFSISVSAHGSVSSPIPRSPGDAMKSVCGSTVTGILSSDINTNQQALEQNSHQADGGFTDACQLYLCKGTQFEDNSANVESYSLGQTVDFTVNIVAPHTGVANVSIVNTNTNTIIGEPLISWEDYASNSHTIPSNQTSFSITIPSTLDSTCSTAGNCVLQWWWDARSIDQTYMSCIDFAVSGGSTTSSNGTPSSTLISSISSSTTPTSTAIEEDC

SEQ ID NO: 115 - protein, 210 aa, Alternaria alternata
  >XP_018382308.1 hypothetical protein CC77DRAFT_996412 [Alternaria alternata]
MYFTTVATATFLTLIPRVLSHGLITSPPSRPTGPTLNSLCGPAITRTINNDNTSHVEGLPELLAAPYSASTCNLWLCKGLQFSDNPANNTQVWSAGQAVPLKVWIRIPHEGSANVSIVDTKRNEIVGDMLKVWEEGYAPGKSESDVPIGQREFSVTIPEGLEEKCAVAGDCVLQWWWYGNAARQTYESCVDFKIAKMGAKRDAFGRAFKG

SEQ ID NO: 116 - protein, 205 aa, Pseudogymnoascus
  >OBT52995.1 hypothetical protein VE04_06493 [Pseudogymnoascus sp. 24MN13]
MQYLSLATLIGIATTVSSHGVITSPTPRIAGAVSHAACGTAITLLHKQDVTDHVEGMPQVAAVDSTYHADECNLWLCKGLQLDEEASGPVQTYSPGQVVPIEVYLRILHAGTANVSIVDTASNTVVGSELLYWDSYADEKLPSVPVNNTLFSVTIPSDIEEGKCTTAGECVIQWWWYGVGARQTYESCVDFVLAPTAPSSRIRRN

SEQ ID NO: 117 - protein, 199 aa, Diplocarpon rosae
  >PBP19799.1 hypothetical protein BUE80_DR009300 [Diplocarpon rosae]
MHPSASILGLAAFATTVLSHGAITSPPTRAVGPAMDAACGTSVSALVRADNTSHVEDMPEAAALIPNFNSTACNVFLCRGQQFGDNQANVQNFTAGEVVNMRAILPIPHEGPMNVSIVKTSTNTAIGAPLISFKSYADESLATLPANNTNFNVTVPSDLGSECSVAGACVMQWFWFGTGAKQTYESCVDFVVPANETRM

SEQ ID NO: 118 - protein, 320 aa, Neofusicoccum parvum
  >EOD46108.1 putative chitin binding protein [Neofusicoccum parvum UCRNP2]
MSAKYILAIPALASAVYGHGFVTSPQPRMPGDAMASACGQQVYNNQKSDNYGNIQGELQVASSQSDYKAADCDIWLCKGYKLADNTDNVQTYTAGQTVPFTVDIRAPHTGVANVSIVDTASNSVIGSALKSWDDYASTATGVTSDETSFDITIPSDLGSQCSTAGDCVIQWYWYAESIDQTYESCVDFTVGGSGSGSSSGSGSSSAASSAAASTPAATTSVAVQAVASTTLATSVASSIPTTTAAATAASGDLAAELAAAFPSSVLTQVLPSTPTATSGVVPETSLPEGTTVQDLIDWFVSLTQSLTSSGNHARDVARRV

SEQ ID NO: 119 - protein, 210 aa, Alternaria alternata
  >OWY51538.1 putative chitin binding protein [Alternaria alternata]
MYFTTVATATFLTLIPRVLSHGLITSPPSRPTGPTLNSLCGPAITRTINNDNTSHVEGLPELLAAPYSASTCNLWLCKGLQFSDNPANNTQVWSAGQVVPLKVWIRIPHEGSANVSIVDTKRNEIVGDMLKVWEEGYAPGKSESDVPIGQREFSVTIPEGLEEKCAVAGDCVLQWWWYGNAAKQTYESCVDFKIAKMGAKRDAFGRAFKG

SEQ ID NO: 120 - protein, 191 aa, Aureobasidium subglaciale
  >XP_013341408.1 hypothetical protein AUEXF2481DRAFT_68077, partial [Aureobasidium subglaciale EXF-2481]
MKYTTTALAVAGMAATVRGHGFLTSPKARMPGDAFQAACGQQVYYNQAGDNYGNIQGELQVAKTQTDYKAAECNIWLCKGFKFDDNKDLVQTYTPGQKVPIKFDVRAPHTGTANVSIVDTATNTVIGTPLISWDVYASTASGVPADQTSFDITIPEDLGSKCSTAGACVIQHFWDAREVDQTYESCIDFTV

SEQ ID NO: 121 - protein, 297 aa, Aspergillus niger
  >XP_001389651.1 chitin binding protein [Aspergillus niger CBS 513.88]
MKQAGSILALAGLVSLAQGHGFVTSPQARMPGSAMEKACGQQVYNNQEADNYGNVQGELQIASGQSDYNADACDIWLCKGYKYADNKDNVYSYTAGETVDFTVDIRAPHTGTANVSVVDTASNTVIGSPLIYWSVYASTSTGVTKNETSFSVTIPDDLGDKCTEGGACVLQWWWNAASIDQTYESCIDFTVGGSGSSSSSSSSSSSSSSVAASQPTTTAAAAAVTTPSTANNVAPASSSVPTTLATSVKQSATVAPVAASSAAAAASSGVSIPTDGTAEEQLTWVASLLKALLKYAN

SEQ ID NO: 122 - protein, 298 aa, Aspergillus niger
  >EHA27004.1 hypothetical protein ASPNIDRAFT_51753 [Aspergillus niger ATCC 1015]
MKQAGSILALAGLVSLAQGHGFVTSPQARMPGSAMEKACGQQVYNNQEADNYGNVQGELQIASGQSDYNADACDIWLCKGYKYADNKDNVYSYTAGETVDFTVDIRAPHTGTANVSVVDTASNTVIGSPLIYWSVYASTSTGVTKNETSFSVTIPDDLGDKCTEGGACVLQWWWNAASIDQTYESCIDFTVGGSGSSSSSSSSSSSSSSSVAASQPTTTAAAAAVTTPSTANNVAPASSSVPTTLATSVKQSATVAPVAASSAAAAASSGVSIPTDGTAEEQLTWVASLLKALLKYAN

SEQ ID NO: 123 - protein, 208 aa, Verticillium dahliae
  >PNH51851.1 hypothetical protein VD0003_g5437, partial [Verticillium dahliae]
MASKIMSLLSIVAAVSAHGIVTSPPPRPVGDAFRAACGNTMFNMINSDPLGNIQGMEQGRDASLASADCNLNLCKAFKFEDNPAANIQSYSPGETVNMLVRIGAPHTGIANVSVVDTTTNTIIGTPLIEFTNYASTRTGVAANNTDFSFDLPATLPAQCATAGNCVLQWFWDSDEAGQTYLSCIDFTTTGTGSAPPAPAPPAASSAPI

SEQ ID NO: 124 - protein, 284 aa, Aspergillus nomius
  >XP_015407448.1 putative chitin binding protein [Aspergillus nomius NRRL 13137]
MKQTGTVLALAGLVSMAHGHGFVTSPKPRMPGSAFSEACGQQMYNNQEADNYGNIQGELQVANGQSDYDAAKCNAWLCKGYKFDDNKDNVFQYTPGQNLDFTVDIRAPHTGVANVSVVDTASNAVIGEALKSWDVYASTETGVKETDKKFSVTLPSDLGNKCSEAGACVLQWYWFAESIDQTYESCIDFTMSGSGSGSSSAASSAASTAAATASSTATGVAVTATPTTGNNVAAPSGFATSAKPSATSAPSSAASTVTIPTDGTAEEKLNWVASLLQTLVKYTA

SEQ ID NO: 125 - protein, 204 aa, Phialocephala scopiformis
  >XP_018075643.1 hypothetical protein LY89DRAFT_639261 [Phialocephala scopiformis]
MHISILSLGLLATQVLGHGLITKPWPRTPGALSLAACGPTVTNNIKGDNTSHVEGLPEAAMTDAKYNAAECNLWLCRGLQLEESAKANVIAYTPGQKVSMSVKISIKHHGTANVSIISTKTNKIIGDELLYWDKYADERLPAMPANNTQFDVVIPTTLGSQCANAGDCVLQWWWYGTAARQTYESCVDFTVAPTMPMLEKRFEA

SEQ ID NO: 126 - protein, 194 aa, Phialocephala subalpina
  >CZR66324.1 related to chitin binding protein [Phialocephala subalpina]
MIASILLLGTLASTAFSHGLITSPPSRVAGTAMQAACGTAVTALVQADNTSHVEGMPEAAATTANFNSTACNVFLCKGLQFADNTANVQNFTAGQVVNMRASIPIPHEGPMNVSIINTQTNTAIGAPLITFDSYADESLAALPANNTNFNVTIPNNLGTNCTTAGTCVLQWFWFGTAADQTYESCVDMVVAAKA

SEQ ID NO: 127 - protein, 270 aa, Aspergillus taichungensis
  >PLN85536.1 hypothetical protein BDW42DRAFT_190819 [Aspergillus taichungensis]
MKHTISLLALIGLAHGHGFVTSPKPRMPGSAMEAACGQQVVTNQKADNYGNVQGELQVTSGQGDFSAEKCNIFLCKGYKFEDNKDNIYSYSAGQKIDFKVDVRAPHTGVANVSVVDTASNSIIGKPLKSWEKYASTETGVADSDKEFSVTLPDNLSQCSEAGACVLQWYWFAESIDQTYESCIDFTVDGSGSGTGPSDPSPTTSSVPTTTAAPTQSAPAPPTIPTTLSTIAKPAPTGLPQINPGMPTDASAEEKLEWVSGVLKSLLGYFQ

SEQ ID NO: 128 - protein, 270 aa, Aspergillus candidus
  >XP_024672570.1 hypothetical protein BDW47DRAFT_105047 [Aspergillus candidus]
MKHTISLLALIGLAHGHGFVTSPKPRMPGTAMQAACGQQVVTNQKSDNYGNVQGELQVTSGQDDFNAEDCNIFLCKGYKFEDNKDNVYSYSAGQKIDFKVDVRAPHTGVANVSVVDTASNSVIGEALKSWEKYASTETGVADSDKEFSVTLPDNLSQCSEAGACVLQWYWFAESIDQTYESCVDFTVDGSGSGTGPSDPSPTTSSAPTTTAAPTQSAPPPPPIPTTLSTIGKPAPTGLPQINPGLPTDATAEEKLEWVGGVLKSLLGYFR

SEQ ID NO: 129 - protein, 289 aa, Aspergillus thermomutatus
  >OXS11115.1 hypothetical protein CDV56_02405 [Aspergillus thermomutatus]
MKQTGTLVALAGLVSMVHGHGFVTSPQPRMPGAAMKAACGNQVEINQQSDNYGNIQGELQVAKSQSDYNAEECDIWLCKGYKFADNKDNVYSYTAGQTVDFVVDIRAPHTGVANVSVVDTASNTVIGNTLKSWTDYASTATGVTSDETNFSITIPDDLGSKCSEAGACVLQWYWYAESIDQTYESCIDFTVGGSGSSSSGSSSSAASSSSSAPASTSATSIAVTTPSTGNNVVSSAPTTMVTSVKQTATSAAATASATASSVSFPTSGTAEEQLSFMAALLKSLMQYAA

SEQ ID NO: 130 - protein, 206 aa, Pseudogymnoascus
  >OBT73040.1 hypothetical protein VF21_07734 [Pseudogymnoascus sp. 05NY08]
MQYLSLVTLVGIATTVSSHGVITSPTPRIAGAVSRAACGTAITLLHKQDVTDHVEGMPEVAAVDSTYNADECNLWLCKGLQLDEEASGPVQTYSPGQVVPIEVYLRILHAGTANVSIVDTASNSVVGSELLLYWDSYADEKLPSVPENNTLFSVTIPSDIEEGKCTTAGECVIQWWWYGVGARQTYESCVDFVLAPAAPSSRIQRN

SEQ ID NO: 131 - protein, 270 aa, Aspergillus campestris
  >XP_024697201.1 hypothetical protein P168DRAFT_314679 [Aspergillus campestris IBT 28561]
MKHTISLLALIGLAHGHGFVTSPKPRMPGTAMQAACGQQVVTNQKSDNYGNVQGELQVTSGQDDFSAEDCNIFLCKGYKFEDNKDNVYSYSAGQKIDFKVDIRAPHTGVANVSVVDTASNSVIGEALKSWEKYASTETGVADSDEEFSVTLPDNLSQCSEAGACVLQWYWFAESIDQTYESCVDFTVDGAGSGTGPSDPSPTTSSVPTTTAAPTQSAPPPPPIPTTLSTISKPAPTGLPQINPGMPADATAEEKLEWVGGVLKSLLGYFR

SEQ ID NO: 132 - protein, 205 aa, Pseudogymnoascus
  >KFY73594.1 hypothetical protein V499_06354 [Pseudogymnoascus sp. VKM F-103]
MQYLSLAALVGIATTVSSHGVITSPTPRIAGAVSRAACGTAITLLHKQDVTDHVEGMPQVAAVDSTYHADECNLWLCKGLQLDEEASGPVQTYSRGQVVPIEVYLRILHAGTANVSIVDTASNTVVGSELLYWDSYADEKLPAVPANNTLFSVTIPSDIEEGKCTTAGECVIQWWWYGVGARQTYESCVDFVLAPTAPSSRIRRN

SEQ ID NO: 133 - protein, 208 aa, Meliniomyces variabilis
  >PMD34234.1 hypothetical protein L207DRAFT_497575 [Meliniomyces variabilis F]
MLFSLNSLIVAASLVATVASHGLITKPVPRGPGTASLAACGKAVTNNIKGDLTSHVEGLPEAAKTDSTYKPDECNLWLCRGLQYGDNTANVETYTAGQVVPFDVKITIKHNGTANVSIVDTKSNKVVKQLLYWDHYADEKLASLPANNTAFDVTIPSDLNGACATAGSCVLQWWWYGYGAKQTYESCVDFTVAAPTAAKMMNKRFWRV

SEQ ID NO: 134 - protein, 290 aa, Aspergillus bombycis
  >XP_022387727.1 putative chitin binding protein [Aspergillus bombycis]
MKQTGTVLALAGLVSMAHGHGFVTSPQPRMPGTAFSEACGQQMYNNQQADNYGNIQGELQVANGQNDYDAAKCDAWLCKGYKFDDNKDNVFQYTPGQNLDFTVDIRAPHTGVANVSVVDTASNTVIGEALKSWDVYASTETGVKETDKKFSVTLPSDLGSKCSEAGACVLQWYWFAESIDQTYESCIDFTMSGSGSGSSSGSSSAVSSAASTAAATATASSTATGVAVTATPTTGNNVAAPSGFATSAKPSATSAPSSAASTVTIPTDGTAEEKLNWIASLLQTLVKYTA

SEQ ID NO: 135 - protein, 207 aa, Phialocephala subalpina
  >CZR68545.1 uncharacterized protein PAC_18444 [Phialocephala subalpina]
MHFSTLALSLLVAATEIAGHGLITKPVPRAPGAISLANCGPTVTNNIKGDETSHVEGLPEAAINDKAFKAAECNLWLCRGLALEDSAKSSVVAYTPGQKVSMSVKITIKHHGTANVSVVNTKTNKIIGEPLLYWDKYADERLTTMPANNTQFDFTIPTTLGSQCATAGDCVIQWWWYGTAAKQTYESCIDFTVGGMTMPMKEKRFEA

SEQ ID NO: 136 - protein, 290 aa, Aspergillus lentulus
  >GAQ10514.1 hypothetical protein ALT_7835 [Aspergillus lentulus]
MKQTGTLVALAGLVSMVHGHGFVSSPKPRMPGAAMKAACGNQVEINQQSDNYGNIQGELQVAKSQSDYNAGECDIWLCKGYKFEDNKDNVYSYTAGQTVDFVVDIRAPHTGVANVSIVDTATNTVIGNTLKSWTDYASTATGVSQDETNFSITIPDNLGSKCSEAGACVIQWYWFAESIDQTYESCIDFTVGGSSSGSSSGSSSGSSSGSSSGSSAATTTPSVAVTTPSTGNNVVSTPTTMVTSVKPTATAAAGTGNGASSSTSFPTSGTAEEQLSYVASVLKSLLQYIA

SEQ ID NO: 137 - protein, 269 aa, Fusarium
  >CEG04929.1 unnamed protein product [Fusarium sp. FIESC_5 CS3069]
MKNAAGILAFLPLVAAHGFIKSPAPRMPGDAFKAACGEQPFYQQSSDINGNVQGIKQVVPKDLDASKCNLWLCKGFQFDDNKANVQSYKLGEKIPFEINIAAPHTGYANVSVVKTSSDTMIGTPLIEFDHYAANSGTDKNNTAFSVTLPKSLGGDCTKAGDCVLQWFWNAPDIDQTYEACVDFTDEDCDEEETPTTTAAAEKPAATTLQAVAISSSADSGAAQPTSAPVADNDEDCEDEEPATNDDEDCEEDEPVAQDGDDEECPADDY

SEQ ID NO: 138 - protein, 319 aa, Diplodia seriata
  >KKY21290.1 putative chitin binding [Diplodia seriata]
MSAKYIAALPVLATMVAGHGFISKPQARMPGDAMAAACGQQVYSNQNSDHYGNVQGELQVASSQSDYDAAACDIWLCKGYKFADNKDNVQTYTAGQEVAFTAEIHAPHTGVANVSIVDTASNSVIGSALKSWDVYASTSTGVKDTDTSFSITMPSDLGDQCSTAGDCVIQWYWFAEDIDQTYESCVDFTMSGSGSGSSSSGSSSSAAASPATSAAAVAAVAATPSSTLATSAVATPATTAASSSSDSKLAQQIAAAFPSSVLTQTLPASATGTASVVPESSLPEGTTVQDLVDWFAQLVESIESSASKKARRHARDLRA

SEQ ID NO: 139 - protein, 294 aa, Aspergillus udagawae
  >GAO89145.1 hypothetical protein AUD_8105 [Aspergillus udagawae]
MKQTGTLVALAGLVSMVHGHGFVSSPKPRMPGPAMKAACGNQVEINQQSDNYGNIQGELQVAKGQSDYTAGECDIWLCKGYKFADNKDNVYSYTAGQTVDFVVDIRAPHTGVANVSVVDTATNTVIGNTLKSWTDYASTATGVSKDETNFSVTIPDNLGSQCSEAGACVLQWYWYAQSIDQTYESCIDFTVGGSGSSSSGSSSSGSSSGSGAGSGSSSAPTSTASIAVTTPSTGNNVVTSTPTTMVTSVRPSATSTAGTGNGAGSSTSFPTSGTAEEQLSFLSSLLKSLMQYAA

SEQ ID NO: 140 - protein, 189 aa, Plicaturopsis crispa
  >KII93821.1 hypothetical protein PLICRDRAFT_171527 [Plicaturopsis crispa FD-325 SS-3]
MFSTALFPLVFAAHALAHGVVTTPTPRKIGSAVKSACGTAVYNELKSDEYGPIENSVAKEDSTYNADECHLYFCRGYEYADNTDNIRAYAAGTEVAFHVDLEAHHTGLANVSVVDVAARTVIGSPLFNWPVYANESLPPAEWPANETDFTVTVPDLGTKCATAGACAIQWWWYAYSNDQTYESCVDFTQ

SEQ ID NO: 141 - protein, 222 aa, Verticillium dahliae
  >PNH76515.1 hypothetical protein VD0001_g1085 [Verticillium dahliae]
MASKIMSLLSIVAAVSAHGIVTSPPPRPVGDAFRAACGNTMFNMINSDPLGNIQGMEQGRDASLASADCDLNLCKAFKFEDNPAANIQSYSPGETVNMLVRIGAPHTGIANVSVVDTTTNTIIGTPLIEFTNYASTRTGVAANNTDFSFDLPATLPAQCATAGNCVLQWFWDSDEAGQTYLSCIDFTTTGTGSAPPRPPPPRPPPPPPPPGAPPPPPPPRFN

SEQ ID NO: 142 - protein, 217 aa, Verticillium dahliae
  >PNH42266.1 hypothetical protein VD0004_g5000, partial [Verticillium dahliae]
MASKIMSLLSIVAAVSAHGIVTSPPPRPVGDAFRAACGNTMFNMINSDPLGNIQGMEQGRDASLASADCDLNLCKAFKFEDNPAANIQSYSPGETVNMLVRIGAPHTGIANVSVVDTTTNTIIGTPLIEFTNYASTRTGVAANNTDFSFDLPATLPAQCATAGNCVLQWFWDSDEAGQTYLSCIDFTTTGTGSAPPAPAPPAASSAPVVEEPAAPTT

SEQ ID NO: 143 - protein, 198 aa, Pseudogymnoascus
  >KFY37648.1 hypothetical protein V494_04660 [Pseudogymnoascus sp. VKM F-4513 (FW-928)]
MRYLSLAALAGIASTASAHGVITSPTPRIAGAASLAACGTAVTLLHKQDVTDHVEGKPEVAAVDSTYHADECNLWLCTGLQLDEEASGPVQTYSPGQVVPIEVYLRILHAGTANVSIVDTASNSIVGSELLYWDSYADETLPTVPENNTLFSVTIPSDIEEGKCTTAGECVIQWWWYGVGAKQTYESCVDFVLAPAAE

SEQ ID NO: 144 - protein, 188 aa, Rhizoctonia solani
  >CUA67606.1 hypothetical protein RSOLAG22IIIB_07469 [Rhizoctonia solani]
MRFFASLLTLATLASSVVAHGIVTQPPTRTLGSAMIAACGAGAVSAQQSNVKGPIESQIAKIDSNYKPAQCNLFLCRGQQFADNTGKVQTYKPGQVVNIVLDIENHHPVGYANVSVIDTATNKIVGSPLIAWDPYFTGYPYPKDQENFNVTIPELNGKCKTGGECVLQYHWYSRTDKQTYQNCVDFVV

SEQ ID NO: 145 - protein, 303 aa, Aureobasidium melanogenum
  >KEQ66062.1 chitin binding protein [Aureobasidium melanogenum CBS 110374]
MKYSTAALALAGMATTVRGHGFITSPKARMPGDAFEAACGQQVYYNQAGDNYGNIQGELQVAKTQSDYNAEKCQIWLCKGYKYEDNKDLVETYTPGQKVPIKFDVRAPHEGTANVSVIDTATNTIIGTPLISWDVYASSASAIPADQTSFTVTIPEDLGSKCSTPGACVLQHFWDARSVDQTYESCIDFTVSGSGSGAAPASSKAASSSAAPVSSQKAASSSSAPAKAPITSAAAASSAAKPTTMATVVKSSSAAPVSSSSASGTVSAWDEHGLWVSVVLKRLFAVLNWSKERSHDRFSGCGG

SEQ ID NO: 146 - protein, 284 aa, Aspergillus fumigatus
  >KEY78006.1 chitin binding protein [Aspergillus fumigatus var. RP-2014]
MKQTGTLVALAGLVSMVHGHGFVTSPKPRMPGPAMKAACGNQVEINQQSDNYGNIQGELQVAKGQSDYNADECNIWLCKGYKFDDNKDNVYSYTAGQTVDFVVDIRAPHTGVANVSVVDTATNTVIGNTLKSWTDYASTATGVSQDETNFSITIPDNLGSKCSEPGACVLQWYWFAESIDQTYESCIDFTVGGSGSGAGSSSSAGSGSSIPTATPSVAVTTPSTGNNVISTPTTMVTSVRPTATSAAGTGNGAGSSTSFPTSGTAEEQLSYIASVLKSLLQYIA

SEQ ID NO: 147 - protein, 290 aa, Verticillium dahliae
  >PNH32973.1 hypothetical protein BJF96_g3868 [Verticillium dahliae]
MASKIMSLLSIVAAVSAHGIVTSPPPRPVGDAFRAACGNTMFNMINSDPLGNIQGMEQGRDASLASADCNLNLCKAFKFEDNPAANIQSYSPGETVNMLVRIGAPHTGIANVSVVDTTTNTIIGTPLIEFTNYASTRTGVAANNTDFSFDLPATLPAQCATAGNCVLQWFWDSDEAGQTYLSCIDFTTTGTGSAPPAPAPPAASSAPIVEEPAAPTTTAAAPALPTTTAPAAGATTSAAAPVVEEPAAPTTTAAPVPTSPPTTCKRRRVRRNSAAAKKYRAAKRAAALRR

SEQ ID NO: 148 - protein, 264 aa, Verruconis gallopava
  >XP_016217987.1 hypothetical protein PV09_01053 [Verruconis gallopava]
MRISAAVFSIISLAYGHGIVTSPKPRQPGPAMQAACGQQVYNNQASNDQGNIQNMLQVGASQSDFDPAKCNVWLCKAYQFADNSANVQTYTAGQVVPIKVDISAPHTGVMNMSIVNTATNTVIGSPLISFSDYASNAHTIPANNTDFSITMPDVSSQCGTAGACVIQWFWDARSVDQTYEACIDFTMGGSGGGATTPTTTAAASVSTTKAAVATTTSAAASASTPETDCEDDTPAPSSVPEVECDDGFIATKERRHPRDFSTEA

SEQ ID NO: 149 - protein, 290 aa, Aspergillus fumigatus
  >XP_752813.1 chitin binding protein, putative [Aspergillus fumigatus Af293]
MKQTGTLVALAGLVSMVHGHGFVTSPKPRMPGPAMKAACGNQVEINQQSDNYGNIQGELQVAKGQSDYNADECNIWLCKGYKFDDNKDNVYSYTAGQTVDFVVDIRAPHTGVANVSVVDTATNTVIGNTLKSWTDYASTATGVSQDETNFSITIPDNLGSKCSEPGACVLQWYWFAESIDQTYESCIDFTVGGSGSGSGSGSGAGSSSSAGSGSSIPTATPSVAVTTPSTGNNVISTPTTMVTSVRPTATSAAGTGNGAGSSTSFPTSGTAEEQLSYIASVLKSLLQYIA

SEQ ID NO: 150 - protein, 283 aa, Aspergillus novofumigatus
  >XP_024682479.1 hypothetical protein P174DRAFT_441154 [Aspergillus novofumigatus IBT 16806]
MKQTGTLVALAGLVSMVHGHGFVTSPKPRMPGPAMKAACGNQVEVNQQSDNYGNIQGELQVAKSQSDYSAGECDIWLCKGYKFDDNKDNVYSYTAGQTVDFVVDIRAPHTGVANVSVVDTATNTVIGNTLKSWTDYASTATGVSQDETNFSITIPDNLGSKCSEAGACVIQWYWFAESIDQTYESCIDFTVGGSGSSSSGSGSSSGSSAATTTPSVAVTTPSTGNNVVSTPTTMVTSVRPTATAAAGTGSDASSSASFPTSGTTEEQLSYVASVLKSLLQYIA

SEQ ID NO: 151 - protein, 262 aa, Coniochaeta ligniaria
  >OIW33770.1 hypothetical protein CONLIGDRAFT_193181 [Coniochaeta ligniaria NRRL 30616]
MRPTPFFLPVPLPHTTPSPLLLLPLLLTLTLLPTPSQAHGYLSHPPARAAGPATSLACGKPITDAIQRDNTSHIEGLPELALAADSGFDASACNLWLCRGIQFADNNNIQVWRAGQTVGVKVKITIPHDGSANVSIVDAARNEVVGDMLVFWEAGYANEREFFAGSLPVNNTEFNITLPDVGARCGRAGDCVLQWWWYGKGARQTYESCVDFVMVPAGDKAGLDTRAEGQFGWRRWVGLLPWRRTRADEERPRKAFSSRLDR

SEQ ID NO: 152 - protein, 298 aa, Verticillium longisporum
  >CRK23077.1 hypothetical protein BN1708_013609 [Verticillium longisporum]
  UNSURE 193: Xaa can be any amino acid
MASKIMSLLSIVAAVSAHGIVTSPPPRPVGDAFRAACGNTMFNMINSDPLGNIQGMEQGRDASLASADCNLNLCKAFKFEDNPAANIQSYSPGETVNMLVRIGAPHTGIANVSVVDTTTNTIIGTPLIEFTNYASTRTGVAANNTDFSFDLPATLPAQCATAGNCVLQWFWDSDEAGQTYLSCIDFTTTGTGXAAPAVPTTTAPAAGATTSAAAPVVEEPAAPTTTAAAPAVPTTTAPAAGATTSAAAPVVEEPAAPTTAAAPVPTSPPTTCKRRRVRRNSAAAKKYRAAKRAAALRR

SEQ ID NO: 153 - protein, 300 aa, Aspergillus ochraceoroseus
  >PTU23013.1 hypothetical protein P175DRAFT_0474793 [Aspergillus ochraceoroseus IBT 24754]
MKQASSILALAGLISLAHGHGFVTSPKPRMPGSAMEAACGQQVTINQESDNYGNIQGELQIAAGQSDYNAAACDIWLCKGYKYADNTANVFSYTAGETVDFVVDIRAPHTGVANVSIVDTASNTVIGGPLISWDVYASTATGVTKNETNFSITIPDDLGDKCSEGGACVIQWYWYAQSIDQTYESCIDFTLGSGSSSSSASIASTSSTSSASTSNTSTVTDTATATVTATATVFPTSLSSTSLASTTLATHVKIASTTASSASASASAETSSVTIPKDGTSEEKLHWAGSILKALMQYAN

SEQ ID NO: 154 - protein, 198 aa, Pseudogymnoascus
  >KFY09240.1 hypothetical protein V492_05565 [Pseudogymnoascus sp. VKM F-4246]
MRYLSLAALAGIATTASAHGVITSPTPRIAGAASLAACGTAVTLLHKQDVTDHVEGKPEVAAVDSTYHADECNLWLCTGLQLDEEASGPVQTYSPGQVVPIEVYLRILHAGTANVSIVDTASNSIVGSELLYWDSYADETLPTVPENNTLFSVTIPSDIEEGKCTTAGECVIQWWWYGVGAKQTYESCVDFVLAPAAE

SEQ ID NO: 155 - protein, 205 aa, Pseudogymnoascus
  >KFY40801.1 hypothetical protein V495_05251 [Pseudogymnoascus sp. VKM F-4514 (FW-929)]
MHYLSLATIVGVASTASAHGVITSPTPRIAGNASLAACGTAVQLLNTQDVTTHVEGLPEVAAVDSTYHPDECNLWLCKGLQLDEEASGPVQTYSPGEVVPIDVNLRILHDGTANVSIVDTASNTIVGSQLLYWDDYANEKLPSVPENNTHFSITIPDDIEEGKCTTAGECVIQWWWYGVAADQTYESCIDFVLGDAAPSSRIRRK

SEQ ID NO: 156 - protein, 188 aa, Serpula lacrymans
  >XP_007314087.1 hypothetical protein SERLADRAFT_458151 [Serpula lacrymans var. lacrymans S7.9]
MFAQLIALVSAASIVSTVCAHGVISSPPRRLPGPAFEAACGSQIYSIVSSDQYGNQQQEEQNINSETTSACELYLCKGLEYADNTNNVQQFTANQVVPIQIDLRAPHTGVANVSVVATASNSVIAGPLISFDPAYSTSTAIPANQTSFSVTIPNLNGQCATAGECVLQWWWDARSIDQTYMSCVDFTQ

SEQ ID NO: 157 - protein, 233 aa, Hirsutella minnesotensis
  >KJZ72446.1 hypothetical protein HIM_08115 [Hirsutella minnesotensis 3608]
MRSELVAVAYFAASAAAHGKVLSPPARPAGRAMVQACGQEAVDSINKDDTIPLEDVLNPSPSCNLFLCRGAQFEDNQDAVQKFTPGQTINFKADLSIPHEGPCNVSVVDTATNKIVGDPLITFDSYADEKLPQLPANNTNFDVTMPNVPAGQCTKPGECVLQWFWFGTDAKQTYESCVDFVVDPSSAKNKTRVTQTPNSRLRSDNTTQGFSGQDRPRQGQTGTVESEAAEEDC

SEQ ID NO: 158 - protein, 188 aa, Aspergillus versicolor
  >OJJ07509.1 hypothetical protein ASPVEDRAFT_88757 [Aspergillus versicolor CBS 583.65]
MFSSITFAVLAAALGVHGHAVVEDPAPRKTGPAHEAACGLAVVDVLENDIAGPIENAVEAADEDYNCNAYLCRGYQFEDNEDNVKVVKGGDVLEFHINLVAGHHPGYANVSIVETATNEVVGQPLVTWANWPDHLSGPPRNDTDYNVTIPNSLGAPCDVAGNCVIQWYWYASGNEQTYESCQDFYVEV

SEQ ID NO: 159 - protein, 205 aa, Pseudogymnoascus
  >KFX91099.1 hypothetical protein O988_07922 [Pseudogymnoascus sp. VKM F-3808]
MHYLSLATIVGIASTASAHGVITSPTPRIAGKASLAACGTAVQLLNTQDVTTHVEGLPEVAAVDSTYHPDECNLWLCKGLQLDEEASGPVQTYSPGEVVPIDVNLRILHDGTANVSIVDTASNTIVGSQLLYWDDYANEKLPSVPENNTHFSITIPDDIEEGKCTTAGECVIQWWWYGVAADQTYESCIDFVLGDAAPSSRIRRK

SEQ ID NO: 160 - protein, 334 aa, Aspergillus ochraceoroseus
  >KKK13050.1 hypothetical protein AOCH_005748 [Aspergillus ochraceoroseus]
MKQASSILALAGLISLAHGHGFVTSPKPRMPGSAMEAACGQQVTINQESDNYGNIQGELQIAAGQSDYNAAACDIWLCKGYKYADNTANVFSYTAGETVDFVVDIRAPHTGVANVSIVDTASNTVIGGPLISWDVYASTATGVTKNETNFSITIPDDLGDKCSEGGACVIQWYWYAQSIDQTYESCIDFTLGSGSSSSSASIASTSSTSSASTSSVASSSTATATTTTATAPVTTTTTTTTTTITTTTDTSTVTDTATATVTATATVFPTSLSSTSLASTTLATHVKIASTTASSASASASAETSSVTIPKDGTSEEKLHWAGSILKALMQYAN

SEQ ID NO: 161 - protein, 301 aa, Aspergillus fischeri
  >XP_001264314.1 chitin binding protein, putative [Aspergillus fischeri NRRL 181]
MKQTGTLVALAGLVSMAHGHGFVTSPKPRMPGAAMKAACGNQVEINQQSDNYGNIQGELQVAKSQSDYNAEECDIWLCKGYKFDDNKDNVYSYTAGQTVDFVVDIRAPHTGVANVSVVDTATNTVIGNTLKSWTDYASTATGVSQDETNFSITIPDNLGSQCSEPGACVLQWYWFAESIDQTYESCIDFTVGGSGSSSSGSNSGSNSGSNSGSSSSSSSSAGSGSSAPTTTPSVAVTTPSTGNNVISTPTTMVTSVRPTATSAAGTGNGAGSSTSFPTSGTAEEQLSYVASVLKSLLQYIA

SEQ ID NO: 162 - protein, 291 aa, Thielaviopsis punctulata
  >KKA29756.1 hypothetical protein TD95_004512 [Thielaviopsis punctulata]
MQSSLVSLLALAASAYAHGRVTSPAPRDIGPAFEKACGSAMFNQMEADPNGNIEGMLQNKAANFNPSVCHLELCKAYQFADNTANVHSFQPGEKVDFKVVIAAPHTGVANVSVVDTTSNSAIGQPLISFTNYASTKTGVAANNTDFSVTMPSDLPSTCSTAGNCVLQWYWFSQEAMQTYISCVDFTTGSGSNSTVGSGSDSGTGSSSSSGPTTLVTATAPAATSAVATSAAATSAAATSAAVTSAGGDDYATAPAATSAATSAPASSAPTSSCSRRRRAIRNSGRMYKTGN

SEQ ID NO: 163 - protein, 184 aa, Ophiocordyceps unilateralis
  >PFH63223.1 hypothetical protein XA68_16662 [Ophiocordyceps unilateralis]
MKYTLITIAAYAAAVAGHGIVTSPPPRGTGPEMEKTCGKAAIDAVGKDPTIPLENFQSPPAECNVFLCRGAKFEDNQANVQNFKPNQTVNFKVDLPIPHEGPANVSIVDTARNKVIGDPLIFFDSYADEKLPQLPANNTDFNVTMPQLKQGQCSKPGACVLQWFWFGTEAKQTYESCVDFVMDE

SEQ ID NO: 164 - protein, 322 aa, Diplodia corticola
  >XP_020134755.1 chitin binding protein [Diplodia corticola]
MSAKYIAALPVLATLVAGHGYISKPQARMPGDAMAAACGQQVYTNQQSDHYGNVQGELQVASSQSDYDAAACDIWLCKGYKFDDNKDNVQTYTAGQEVAFTAEIHAPHTGVANVSIVDTASNSVIGSALKSWDVYASTATGVKDTDTSFSITMPSDLGDQCATAGDCVIQWYWFAEDIDQTYEACVDFTMSGSGSGSSSSGSSSAAASSAASATSKVAVAAAATPSSTLATSAAAATAPATTAASSSSDSQLAQQIAAAFPSSVLTQTLPATATGSASVIPESSLPEGTTVQDLVDWFAELVSSIESSSSKKARRHARDLRA

SEQ ID NO: 165 - protein, 253 aa, Aureobasidium namibiae
  >XP_013424016.1 hypothetical protein M436DRAFT_10522, partial [Aureobasidium namibiae CBS 147.97]
MKYSAVALAVAGMATTVRGHGFLLSPKPRMPGDAFQAACGQQVYYNQAGDNYGNIQGELQVAKTQTDYNAEKCKIWLCKGFKYEDNKDIVSTFTPGQKVPITFDVRAPHEGTANVSIVDTATNTIIGTPLISWDVYASSASSIPTSQTSFSVTIPEDLGSKCSTAGACVLQHFWDARSVDQTYESCIDFTVSGSSSGAAPVSSKAATSAPVSSQKATSSVPAKAPITSTKAATSVAKPTTMSTVVKSSSVAPV

SEQ ID NO: 166 - protein, 188 aa, Jaapia argillacea
  >KDQ56224.1 hypothetical protein JAAARDRAFT_59137 [Jaapia argillacea MUCL 33604]
MFVKLSALATVLAVAGSTVAHGVISSPPRRQPGTNFEAVCGSQIYNTVESDQYGNQQLEEQNINSATTAACQLYLCKGLTYADNTANVQHYAANTVVPITIDLRAPHTGVANVSVVATATNKVIAGPLISFNPAYSVSAPIPANQTSFSVTIPNLNGACATAGACVLQWWWDARSIDQTYMSCVDITQ

SEQ ID NO: 167 - protein, 197 aa, Verticillium dahliae
  >PNH59985.1 hypothetical protein VD0002_g7609, partial [Verticillium dahliae]
MASKIMSLLSIVAAVSAHGIVTSPPPRPVGDAFRAACGNTMFNMINSDPLGNIQGMEQGRDASLASADCNLNLCKAFKFEDNPAANIQSYSPGETVNMLVRIGAPHTGIANVPVVDTPTNTIIGTPLIEFTNYASTRPGVAANNTDFSFDLPATLPAQCATAGNCVLQWFWDSDEAGQTYLSCIDFTTTGTGSAPPA

SEQ ID NO: 168 - protein, 314 aa, Fusarium oxysporum
  >EXM03613.1 hypothetical protein FOIG_05314 [Fusarium oxysporum f. sp. cubense tropical race 4 54006]
MKNAAAILTLLPLVAAHGFVKSPPPRKPGNAFKAACGEQPFYQQSADINGNVQGIKQVVGSNFDAKDCNLWLCKGFQFDDNKDNVQSYKLGEKIDFDVNIAAPHTGYANVSVVKTSTDKMIGEPLIEFENYAANAGLNLNNTAFSVTLPESLGGECTKAGDCVLQWFWDAPDIDQTYESCVDFVVGAGSGSGSGSTKPSSAASAAPVATSAPAAEKPATTLEAVAVTSSVLGPVFESVTTAVPEPTAAAPDAGDDEDCDDEEPVDEGDDEDCDDEDEPTPSAAAETGDDEDCDEDEEPETGDDEECPADDGDDY

SEQ ID NO: 169 - protein, 310 aa, Penicillium brasilianum
  >OOQ90425.1 putative chitin binding protein [Penicillium brasilianum]
MKSFTTTSAAALAALLPLVHGHGFVTSPNPRMPGSAMKAACGNQVEVNQQSDNYGNIQGELQVAASQSDYNAAECDIWLCKGYKFADNQDNIYSYTAGQTIDFTVDIRAPHTGIANVSVVDTASNTVIGDPLIYWSVYASTATGVTANETSFSVTLPDDLGSQCATAGDCVLQWYWYAESIDQTYESCIDFSLGGSSSSSSSSTSTSSSSTVVTSSSAAATTSSSAAAIETTSAAVETTSAAVETTTAQTTTAAIQAVTTFATQARQSSQPSTVTATSSSVASTLAIPTDSAQDTLDFVRSVFKYLVGSD

SEQ ID NO: 170 - protein, 311 aa, Penicillium brasilianum
  >CEO59262.1 Putative Chitin binding protein [Penicillium brasilianum]
MKSFTTTSAAALAALLPLVHGHGFVTSPNPRMPGSAMKAACGNQVEVNQQSDNYGNIQGELQVAASQSDYNAAECDIWLCKGYKFADNQDNIYSYTAGQTIDFTVDIRAPHTGIANVSVVDTASNTVIGDPLIYWSVYASTATGVTANETSFSVTLPDNLGSQCATAGDCVLQWYWYAESIDQTYESCIDFSLGGSSSSSSTSTSTSSSSTVVTSSSAAATTSSSAAAAETTSAAVETSTSAAVETTTAQTTTAAIQAVTTFATQARQSSQPSTVTATSSSVASTLAIPTDSAQDTLDFVRSVFKYLVGSD

SEQ ID NO: 171 - protein, 314 aa, Clohesyomyces aquaticus
  >ORY18348.1 chitin binding domain-domain-containing protein [Clohesyomyces aquaticus]
MKSNVYAFAGLTGLISTVSGHGFVTSPKARMPGTAMGKACGAQVLSNQASDNYGNIQGEIQIASNQADYDAAACDIWLCKGYKLADNTANVQTYTAGQVVPMTVNIRAPHTGTANISIIKTSDHSIIGKPLISWNVYASNAATIPSDQKNFDITIPSDLGSQCSTAGDCVIQWWWDARSIDQTYESCVDFTVGSSGIDSPSPSSAAPASSAPASTAAPLSSAAATSAVASSIAAPASSTVSLVQNIQTPTAAAPTPTAIATSLRSSIPSVASASAIALPTAGTTLQDILDWLNYMISQLRDSKSRRHARDISRA

SEQ ID NO: 172 - protein, 186 aa, Paraphaeosphaeria sporulosa
  >XP_018040564.1 hypothetical protein CC84DRAFT_468667 [Paraphaeosphaeria sporulosa]
MRASTFLTSTFFAATALAHGNIVSPPVRQAGAVTQQVCGAQAVSALTTDITGPLENVASNGSPDCNIFLCKGIQFEDNQNNVQEFAAGEQVDFAAEIPIPHEGPCNVSVVDLATNTLVGQPLISFASYADEALAQLPLNNTQFSVTMPTDLGTQCQQPGECALQWFWFGTNAQQTYEDCVDFVMTA

SEQ ID NO: 173 - protein, 186 aa, Corynespora cassiicola
  >PSN61764.1 hypothetical protein BS50DRAFT_503591 [Corynespora cassiicola Philippines]
MHATSFFAATLFAATALAHGNITSPPARQPGPAMAQVCGDAAVSAILADGTGPLENIQSNGSPDCNIFMCKGTQFADNQANVQSLAPGDVVNFEAQLPIPHEGPCNVSIINTQTNTQIGQPLLVFDSYADENLAVLPPNNTAFSVTMPTDLAGQCQQPGECTMQWFWFGTNAQQTYEDCVDFVMTA

SEQ ID NO: 174 - protein, 313 aa, Penicillium subrubescens
  >OKP06317.1 hypothetical protein PENSUB_6307 [Penicillium subrubescens]
MKSFTTTTAALAALLPLVHGHGFVTSPNPRMPGAAMKAACGNQVEINQQSDNYGNIQGELQVAASQSDYNAAECDIWLCKGYKLADNTDNIYSYTAGQTIDFKVDIRAPHTGIANVSVVDTSSNTVIGDPLISWSVYASTATGVTANETSFSVTMPDNLGSQCATAGDCVLQWYWYAESIDQTYESCIDFTVGGSGSSSSSSSSSSSSSVETTSSVAAATSSSSAVVETSTTSSAAVEATATTQSTTAAAEVTTSAPVQAVTTFATQARQSSQPSTVVATPSAVASTLAIPTDSAADTLEFVRSVFKYLVGSN

SEQ ID NO: 175 - protein, 355 aa, Pestalotiopsis fici
  >XP_007832240.1 hypothetical protein PFICI_05468 [Pestalotiopsis fici W106-1]
MKYAITFGAAVAPMVAAHGMIKTPTPRSAGTAMSSACGSQIYNMMSSDSYGNIQGETQLIGSDFTDECNLWQCKGMQYSDNTANVQSYSTGDVVDITYDIRAPHTGTANVSIVDTASNTIIGDVLAYWSVFASNSQASAANETSFSITIPDLGGKCTTGGECVIQHYWDSQSAGQTYESCIDFTVGGSSSGSSGSASTTTAAATSAAAATSQVATTSQAATSVVAVSSTKSVVSAAATSSAAAETGDDDEDDSCDADDDDEAEDAGDDEDDDSCDADDEDDEPVASSAPASSAAPTTLVTRTSTAAAQATSAASSGSSSGSVALYGQCGGINYSGSTTCASGTCTVMNDYYSQCV

SEQ ID NO: 176 - protein, 322 aa, Ceratocystis platani
  >KKF96594.1 Chitin binding domain protein [Ceratocystis platani]
MKSSVFSIISMASVVYGHGRVMSPPSRAPGPAFEAACGQSMYNQMTSDPNGNIENMLQNKAANYDPNTCQLPLCRGYKFDDNKDNVQSYTAGQTIDFQVDVAAPHTGIANVSVVDTGSFSTIGEPLISWTNYASSQTGVAANNSVFSVVLPSGLPSICGTAGNCVLQWWWFSEVAQQTYISCVDFTTGSGGSDTGNGGTAPSSAAPSSTYAPSAGNTPAVNTPAGNTPAGNTPTAPTTLQTSTSASSASTPQPEYGAPANDPAILTAADPTTAPTTAPTTPQANPVAPTGVQPTTPGSKPTSSCKRRRAIRNSGRMYKGASR

SEQ ID NO: 177 - protein, 278 aa, Aspergillus carbonarius
  >OOF89991.1 hypothetical protein ASPCADRAFT_179954 [Aspergillus carbonarius ITEM 5010]
MKQAGSVLALAGLISLAQGHGFVTSPQARMPGSAMEAACGTQVYNNQEADNYGNVQGELQIASGQSDYDASACDIWLCKGYKYADNKDNVYSYTAGETVDFVVDIRAPHTGTANVSVVETSTNTVIGSPLIYWSVYASTATGVTKNETNFSVTIPEDLGDKCTEGGACVLQWWWNAASIDQTYESCIDFTVVLFVFVFHLGHQHRRCHGAYHHHCRCCHHPRHGQQHRSRFLQRPHHPGHQREGECHHRCCCCLQQRLGLDCVHPHRRYRRGAAHLGG

SEQ ID NO: 178 - protein, 409 aa, Fusarium oxysporum
  >EMT64337.1 hypothetical protein FOC4_g10010833 [Fusarium oxysporum f. sp. cubense race 4]
MKNAAAILTLLPLVAAHGFVKSPPPRKPGNAFKAACGEQPFYQQSADINGNVQGIKQVVGSNFDAKDCNLWLCKGFQFDDNKDNVQSYKLGEKIDFDVNIAAPHTGYANVSVVKTSTDKMIGEPLIEFENYAANAGLNLNNTAFSVTLPESLGGECTKAGDCVLQWFWDAPDIDQTYESCVDFVVGAGSGSGSGSTKPSSAASAAPVATSAPAAEKPATTLEAVAVTSSVLGPVFESVTTAVPEPTAAAPDAGDDEDCDDEEPVDEGDDEDCDDEDEPTPSAAAETGDDEDCDEDEEPETGDDEECPADDGDEYDTQPATPSNTAQGISAAANTAAVTKTQNNAYPVPKPTGKSSSDKTGSGSKGSNNDAGSNNNYGNAGSNTVVTSYVTVAAETHYVTVTADAPACTA

SEQ ID NO: 179 - protein, 190 aa, Hydnomerulius pinastri
  >KIJ62119.1 hypothetical protein HYDPIDRAFT_176665 [Hydnomerulius pinastri MD-312]
MFKLASLVFALAATGSTYAHGVVSSPPRRQPGSAFQSACGLQMYQVASSDQYGNQQNLEGVNINTHVLLQPACTLYLCRGMQFGDNTANVQHYTAGQTVDFKIDIKAPHTGVANVSVVDTTTNSVIGDTLYYIPNAYSTTSPITTNETSFSITMPDVGGKCSTAGNCVLQWWWDARPIDQTYMSCVDFTQ

SEQ ID NO: 180 - protein, 188 aa, Rhizoctonia solani
  >CEL62722.1 hypothetical protein RSOLAG1IB_05079 [Rhizoctonia solani AG-1 IB]
MRFLAGLLTLATLASSVLAHGIVTQPPTRTLGSAMIAACGEGAVSAQKSNVKGPIESQIAKIDSNYKPAQCNLFLCRGQQFADNQNKVQTYKTGQVVNFVLDIENHHPVGYANVSVIDTATNKIVGKPLIAWDPYFTGYPYPKEQENFNVTIPELSGKCKTAGVCVLQYHWYSRTDKQTYQNCVDFVV

SEQ ID NO: 181 - protein, 188 aa, Diaporthe ampelina
  >KKY38989.1 putative chitin binding protein [Diaporthe ampelina]
MKSAAALTLTITLAAGHGIVTSPPTRQVGDAFKAACGEQPFNNQKGDAYGNQQQLEQNAASQKDFDAASCQFFMCKGYQFADNTANVQSFTAGQTVQMKVDIRAPHTGDCNVSVIDLGTNTVVGTPMIEFQNYASTTSGVAENNTDFEITMPDVAAQCGEAGKCAVQWWWDSREADQTYMSCIDFTMA

SEQ ID NO: 182 - protein, 492 aa, Verticillium longisporum
  >CRK32556.1 hypothetical protein BN1723_014639 [Verticillium longisporum]
  UNSURE 199: Xaa can be any amino acid
MASKIMSLLSIVAAVSAHGIVTSPPPRPAGDAFRAACGNTMFNMINSDPLGNIQGMEQGRDASLASADCNLNLCKAFKFEDNPAANIQSYSPGETVNMLVRIGAPHTGIANVSVVDTTTNTIIGTPLIEFTNYASTRTGVAANNTDFSFDLPATLPAQCATAGNCVLQWFWDSDEAGQTYLSCIDFTTTGTGSAPPAPXAPTPTYHRMLYSLTRDFVTFSEPKIWQDAGDARIDTTVLQANGVLYRFTKDEGSATGCRDIIQETSDSLLAGMDGWTTQASCIGRDAGLSAVEGPTAFRSNPNDVNGDKFYLFADEYGGRGDIPLETTDLNNPDWKVSASYSLPTSPRHGTVIGVTAAEHQALVTVDPIVNETLRTVIYPVVPGTDVTNLVPTFVTADGVRASPESGTAVNLSSKVVYTITNSDGSTSEWTLSAVEMRSPVLPGLWADPNIAVFDNTYYLYVTTDGFEGWGGNVNSAAAKKYRAAKRAAALRR

SEQ ID NO: 183 - protein, 220 aa, Sordaria macrospora
  >XP_003349842.1 uncharacterized protein SMAC_00730 [Sordaria macrospora k-hell]
MIQPSALVLLAVSLFTPAASAHGEITSPPARLPGPAMAQACGQQAVNAVLADSTMPIESVPFSSSSSCNPFLCRGALFADNASLLQRFTPGQTIPFKASIPIPHEGPCNVSVVNTQTNSVVGQPLLVFDSYADERLARLPANNTAFSVTLPTDGEVLKECGAPGVCVLQWFWFGEGARQTYESCVDFVVEVSTGVQEGAAQGGGEKLNKCGRVGKRRQRR

SEQ ID NO: 184 - protein, 321 aa, Fusarium venenatum
  >CEI38513.1 unnamed protein product [Fusarium venenatum]
MKNSASILALIPLVAAHGFIKSPAPRMPGDAFKAACGEQPFYQQSSDINGNVQGIKQVVGQSFDATDCNLWLCKGFQFDDNKDNVQSYSLGEKIDFEINIAAPHTGYANVSVVKTSSDSMIGEPLIEFENYASNSGTASNNTAFSVTLPESLGGECTKAGDCVLQWFWDAPDIDQTYEACVDFVVGGSGSGTAPAPSASSGSGTAPAPTASSGSGAEEPATSAPAAEDDDEDCDEEEEPVATTAAAEKPAATTLQAVAISSAADSGSAQPTSAPVADDDEDCYDEEEPVADEDEDCDDEYDEEEPVADDDEECPADAEDDY

SEQ ID NO: 185 - protein, 286 aa, Phialocephala subalpina
  >CZR67295.1 related to chitin binding protein [Phialocephala subalpina]
MQYTSSILAASALITSVSAHGFITSPQARLAGDAMKAACGQQVYNNQASDNYGNIQGELQVAASQTDYNAAECNIWQCKGYKYADNTANVQSYTAGQVVDMTFDVRAPHTGYANVSIVNTATNSIIGDMLLVYSDFADNSKTIPANETSFSITIPSDLGDTCSTAGACVIQHYWNAESIDQTYESCIDFTVGGSGSSSGSSSSSAAVVASSTGAAVVASSSAVVATSAPAVSSTAAAVVTSSSAAPTTLQTVVKSSTVAAVSTPARVSSAPAATETATGDDEDDCY

SEQ ID NO: 186 - protein, 309 aa, Fusarium langsethiae
  >KPA46020.1 hypothetical protein FLAG1_01111 [Fusarium langsethiae]
MKNAAGILAFIPLVTAHGFIKSPAPRMPGDAFKAACGEQPFYQQSSDINGNVQGIKQVVGQNFDAADCNLWLCKGFQFDDNKDNVQSYKLGEKIPFEINIAAPHTGYANVSVVKTSSDTMIGEPLIEFENYAANSGTASNNTAFSVTLPESLGGECTKAGDCVLQWFWDAPDIDQTYESCVDFVVGGSGSGTAPAPSPSSGSGAEEPATSSPAADNEDDEDCDDEDEEPAATTAAAEKPAATTLQAVAISSAADSGSAQPTSAPVADDGEDCDDEYDEEPIADEDEDCDEEDEEPVADDDEECPAEDDY

SEQ ID NO: 187 - protein, 262 aa, Rhizoctonia solani
  >KDN36721.1 hypothetical protein RSAG8_10650, partial [Rhizoctonia solani AG-8 WAC10335]
MDIVAFIMFNKIAALTFVSALVGQVMGHGLVTDPPIRQPGNAFKANCGDQMFYNVQSDPAGNIQQLNQLKASSFSANSCNLNLCKGLQFADVSTANIQSWTAGQVVPIKVDIRAPHTGSANVSIIDTASNTMIGSPLKVFEVYASTSSPITADQTSFSVTIPDLGSKCATAGSCVLQWWWDAPSVTQTYESCVDFTQSGSGSGVPATSIAASTTAAATSAAGTSAAATSAGTTAGSAALPAPRLSPATLTTPTTLPASKQRV

SEQ ID NO: 188 - protein, 331 aa, Hortaea werneckii
  >OTA35359.1 hypothetical protein BTJ68_03274 [Hortaea werneckii EXF-2000]
MKFTTSTLAAAGGMIASANAHGFITSPQARMPGDAMQSACGTQVYYNQMGDNYGNVQGELQVASSQDDYKADPCNIWMCKGFKFEDNKDNAQSYTPGQNVDFTVDIRAPHTGYANVSIVKTSSNTMISDMLKKWDVYASTSTPVPDADKEFSITMPSDLGDECATAGDCVIQWYWNAPDIDQTYEACVDFTMSGSGSGSNSGSDSSPAPSSTQAAGTTSQAAASSAPAITKVAETTSKVASSTTTSEAVASTCACTNQKREVFGQEAASCASTTVVTSTAWATATTTAEHTKTVTATVTAQATDMGAADKARKDLKGRSGNRTHPRDLAMN

SEQ ID NO: 189 - protein, 188 aa, Hydnomerulius pinastri
  >KIJ68282.1 hypothetical protein HYDPIDRAFT_36775 [Hydnomerulius pinastri MD-312]
MMNKLLAFLAIAGLTGSTLAHGVISSPPRRLPGTAFEAACGSQIYSIVSSDQYGNQQQEEQNINSETTAACQLYLCKGLEYADNESNVQKFSANQVVPIEIDLRAPHTGVANVSVVNTKTNSVIAGPLIYFDPAYSVSTPIPANQTSFSVTIPNLNGACGTAGTCVLQWWWDARSIDQTYMSCVDFTQ

SEQ ID NO: 190 - protein, 321 aa, Fusarium poae
  >OBS17726.1 hypothetical protein FPOA_09458 [Fusarium poae]
MKNSASILAFIPLVAAHGFIKSPAPRMPGDAYKAACGDQPFYQQSSDINGNVQGIKQVVGNSFDATDCNLWLCKGFQFDDNKDNVQSYSLGEKIDFEINIAAPHTGYANVSVVKTSSDSMIGEPLIEFENYAANAGTASNNTAFSVTLPETLGGECTKAGDCVLQWFWDAPDIDQTYEACVDFVVGGSGSGTAPAPSSGSGTAPAPTASSGSGAEEPATSSPAAEDDDEDCDEEEEPAATTAAAEKPAATTLQAVAISSAADSGSAQPTSAPVADDDEDCDDEYDDEEPVADEDEDCEDEGDDQAADDDEEECPAEEEYDY

SEQ ID NO: 191 - protein, 243 aa, Rhizoctonia solani
  >EUC61017.1 chitin-binding domain protein [Rhizoctonia solani AG-3 Rhs1AP]
MFNKLAALTFVSALVGQVMGHGLVTDPPIRQVGDAFKANCGEQMFYNIQSDAAGNIQQLNQLKASSFSGTSCNLNLCKGLQFADVAAANIQSWTAGQVVPIKVDIRAPHTGTANVSIIDTASNTMIGSPLKVFESYASTSSPITADQTSFSVTIPDLGSKCNTAGACVLQWWWDARSVDQTYESCVDFTLSGSGEGAPAATSTTASSSAVASTSAATSAAATSAAESSLPLPLSPPPLSSPPL

SEQ ID NO: 192 - protein, 228 aa, Fusarium fujikuroi
  >KLO94011.1 Uncharacterized protein Y057_6669 [Fusarium fujikuroi]
MKNAAALLTLLPLVAAHGFVKSPPPRKPGNAFKAACGEQPFYQQEADINGNVQGIKQVVGSNFDAKECNLWLCKGFQFDDNKDNVQSYKLGEKIDFDVNIAAPHTGYANVSVVKTSTDKMIGEPLIEFENYAANAGLNPNNTAFSVTLPESLGGECTKAGDCVLQWFWDAPDIDQTYESCVDFVVGAGSGSGSGSGSTKPSSAASAAPVATSAPAAEKLGGTWLARAP

SEQ ID NO: 193 - protein, 182 aa, Scedosporium apiospermum
  >XP_016641998.1 Uncharacterized protein SAPIO_CDS6272 [Scedosporium apiospermum]
MKYTVAVASLAALVSAHGNITSPAARLAGPAMAAACGQAAVDAVNADGTIPLENITPETAACNLFLCRGATFDDNVARVQTFTAGQVVDFTAILPIPHEGPCNVSVVDTATNTVIGPPLIEFESYADENLAELPANNTAFSVTIPQLQAGLCTVAGQCVLQWFWFGTGAQQTYESCVDFVLA

SEQ ID NO: 194 - protein, 186 aa, Diaporthe helianthi
  >POS73913.1 hypothetical protein DHEL01_v207696 [Diaporthe helianthi]
MKASIVSASLFAAAVSAHGNITSPPARQAGAAMAVVCGQDAVDTVNADPTIPLEDVTSASAQCDLGLCRGAQFEDNAEQVQQFAPGEIVPMEAFIPIPHEGPMNTSIVDTATNTVIGEPLISFASYADENLAVLPANNTNFNVTMPTNLGPNQCVVAGDCVMQWFWLGTSARQTYESCIDFVMVQA

SEQ ID NO: 195 - protein, 251 aa, Cercospora berteroae
  >PPJ51186.1 hypothetical protein CBER1_07494 [Cercospora berteroae]
MKYLAAVAAFLELVSAHGYFETPIARQPGPAYEAACGSQAFNMMKGDINGNVQGLLQLVANQQDYDAEACGLWLCKGMKFDDNTDNVQTYTAGQEVDLNFAIRAPHSGYANVSIVETATNSIIASDLKKWDEYALTSRPSVASESQFSITIPSDLGSQCSTAGSCVIQMYWNSPPPVDQTYESCIDFTVGGSASGTSPAPAPAPVPSTTPGSGSGGNTTTPVVTPPVTNGTTVGAAPSASATKGSYQYFCA

SEQ ID NO: 196 - protein, 395 aa, Neonectria ditissima
  >KPM38181.1 hypothetical protein AK830_g8380 [Neonectria ditissima]
MQYFAALAAIVPLVAAHGFVQDPPARKPGTAFKAACGEQPYNQQSSDINGNVQGIMQVVGTDFDAAECNLWLCKGFQLDDNTDNVQSFALGETIPFKVTIAAPHTGYANVSVVKTSTNSVIGEPLIEFTNYASNAGVAANNSAFSVTIPDDLGSDCTTAGDCVLQWFWDAPDIDQTYESCVDFTIGAGSSGSEPAVSSTPAAASSAAAASTVAAVSSKAVSEAASSAVTTALAAVTETPAVTTAEAPAATTSAAADDEECPADDDEADDGEDDSADDGEECPADDETDDGEDDSADDGEECPADDETDDGEDTEASITQAAVSVTQAASVTAVAQVSTTPAAQSGSGSSGANNSGSGNSGHYSAVTSYVTVSAKPQTKHHTKYVTVTAAAPACTN

SEQ ID NO: 197 - protein, 188 aa, Rhizoctonia solani
  >EUC63263.1 chitin-binding domain protein [Rhizoctonia solani AG-3 Rhs1AP]
MRFFASLLTLATLASSVVAHGIVTQPPTRTLGNAMIAACGAGAVSAQQSNVKGPIESQIAKIDSNYKPAQCNLFLCRGQQFADNTGKVQTYKAGQVVNIVLDIENHHPVGYANVSVITTATNTIVGKPLIAWDPYFTGYPYPKDQENFNVTIPELSGKCKTAGECVLQYHWYSRTDKQTYQNCVDFVV

SEQ ID NO: 198 - protein, 334 aa, Armillaria ostoyae
  >SJL09943.1 uncharacterized protein ARMOST_13325 [Armillaria ostoyae]
MLSATWISISVALLFAGQALGHGKLTSPSPRSDTIGSAFSEACGSQLLSVETSDAYGNIQQEMQTSTVDSSICNLWLCKGYQFADNEANVQSYTAGQTVSMTAEIRAPHTGIANVSIVATATNTIIGDALYSWDDYASNQSGVTADDEAWDITIPSDLGDQCATAGDCVIQWYWYSESVDQTYEDCVDFTVGGSSNTSGSTSAVSTSESATATSAEATTSVTSVIAVPVSSSATSEAAASTSAATAASSAVVSATSASSIPVVSSISNTATSTAETTAAATSTAVASGSASTVKTSSVATSTSASAASTATSTSTTNANECMNSAPLRSHIDPL

SEQ ID NO: 199 - protein, 188 aa, Rhizoctonia solani
  >KEP49026.1 chitin-binding domain protein [Rhizoctonia solani 123E]
MRFFASLLTLATLASSVVAHGIVTQPPTRTLGNAMIAACGAGAVSAQQSNVKGPIESQIAKIDSNYKPAQCNLFLCRGQQFADNTGKVQTYKAGQVVNIVLDIENHHPVGYANVSVIATATNTIVGKPLIAWDPYFTGYPYPKDQENFNVTIPELSGKCKTAGECVLQYHWYSRTDKQTYQNCVDFVV

SEQ ID NO: 200 - protein, 212 aa, Gaeumannomyces tritici
  >XP_009218182.1 hypothetical protein GGTG_02147 [Gaeumannomyces tritici R3-111a-1]
MWTKLAVFSFLAAQVSAHGNLTSPAARLPGPAMARACGQAAVSTVLADGTTPIENLGTVPATCNPFLCRGAQFDDNKARVQTFAPGQVIKMTAILPIPHEGPCNVSVVETATNRVLGQPLIVFDTYADESLAVLPANNTAFDVTFPADLPAGKCAVAGQCVLQWFWFGTGAKQTYESCVDFVVGAAGAGAGAPAAAPAGAGRLRAKARGWAW

SEQ ID NO: 201 - protein, 364 aa, Armillaria solidipes
  >PBK75971.1 hypothetical protein ARMSODRAFT_417945 [Armillaria solidipes]
MLSATWISISVALLFAGQALGHGKLTSPSPRNDTIGSAFSEACGSQLLSVETSDAYGNIQQEMQTSTVDSSICNLWLCKGYQFADNVANVQSYTAGQTVSMTAEIRAPHTGIANVSIVATATNTIIGDALYSWDDYASNQSGVTADDEAWDITIPSDLGDQCATAGDCVIQWYWYSESVDQTYEDCVDFTVGGSSDSSGSTSAVSASESATATSAEATTSVTSVIAVPVSSSATSEAAASTSAATAVSSAVVSATSASSTAVVSSISNTATSTAETTAAVASGSASTVKTSSVATSTSASAASTATSTSTTNANECMNTYNKCIAASQPNPDWDGCSTTKDTCLETATYFRRVKRSGTLGRRMI

SEQ ID NO: 202 - protein, 340 aa, Cylindrobasidium torrendii
  >KIY62399.1 hypothetical protein CYLTODRAFT_383677 [Cylindrobasidium torrendii FP15055 ss-10]
MLAIVAPFVLLAGQALAHGAINTPPSRSQSVGSAFQDTCGLQMFYQVSSDHYGNIQGEMQVADSSFDASSCNLWLCKGYQFSDNSANVQSYTAGQAVTFKVDIHAPHTGTANVSIVDTTTGSIIGEPLISWDSYASTSTGVAPGDTDFLITMPDLGSQCANPGDCVIQWFWDARSIDQTYEDCVDFTMGGSESASSAVPATSSTAPATSSSVSTAASSSAAAPATSSSAATTSSSSAIVPTTSAVTSASEPATSAAAPTTSAVPTTSAAPPTSTSVASPAPSGGVQDANACMNTYNKCIAQTQPNPDWTGCGATKDTCLSTAKYMRRALKSGTLGRRLRA

SEQ ID NO: 203 - protein, 418 aa, Fusarium fujikuroi
  >XP_023428552.1 uncharacterized protein FFUJ_03505 [Fusarium fujikuroi IMI 58289]
MKNAAALLTLLPLVAAHGFVKSPLSRKPGNAFKAACGEQPFYQQEADINGNVQGIKQVVGSNFDAKECNLWLCKGFQFDDNKDNVQSYKLGEKIDFDVNIAAPHTGYANVSVVKTSTDKMIGEPLIEFENYAANAGLNPNNTAFSVTLPESLGGECTKAGDCVLQWFWDAPDIDQTYESCVDFVVGAGSGSGSTKPSSAASAAPVATSAPAAEKPSATTLEAVAVTSSALGPIFESVTTAVPEPTATAPDAGDDEDCDDEEPVDEGDDEDCDDEDEPTPSAAAETGDDEDCDEDEEPETGDDDEECPADDGDEYDTQPATPSNTAQGISAAANTAAFTKTKDNAYPVPKPTGQSSSDKTGSGSKGSNNNNNAGSNNNYGNAGSNNNAGSNTIVTSYVTVSAAETHYVTVTADAPACTA

SEQ ID NO: 204 - protein, 424 aa, Fusarium fujikuroi
  >SCO32385.1 uncharacterized protein FFMR_02408 [Fusarium fujikuroi]
MKNAAALLTLLPLVAAHGFVKSPLSRKPGNAFKAACGEQPFYQQEADINGNVQGIKQVVGSNFDAKECNLWLCKGFQFDDNKDNVQSYKLGEKIDFDVNIAAPHTGYANVSVVKTSTDKMIGEPLIEFENYAANAGLNPNNTAFSVTLPESLGGECTKAGDCVLQWFWDAPDIDQTYESCVDFVVGAGSGSGSGSGSGSTKPSSAASAAPVATSAPAAEKPSATTLEAVAVTSSALGPIFESVTTAVPEPTATAPDAGDDEDCDDEEPVDEGDDEDCDDEDEPTPSAAAETGDDEDCDEDEEPETGDDDEECPADDGDEYDTQPATPSNTAQGISAAANTAAFTKTKDNAYPVPKPTGQSSSDKTGSGSKGSNNNNNAGSNNNYGNAGSNNNAGSNTIVTSYVTVSAAETHYVTVTADAPACTA

SEQ ID NO: 205 - protein, 185 aa, Colletotrichum tofieldiae
  >KZL64856.1 chitin binding protein [Colletotrichum tofieldiae]
MRASVTAATALLAAMVSAHGNVVSPPARGPGAAMAAACGQENVQAVTTDPTIPLEDLTNPPATCQLDLCRGAKFEDNKANVQTFKPGQVVNMKAEIPIPHEGPMNVSIVDTATNKAIGEPLIVFDSYADEKLAQLPANNTNFDITMPSALPAGACAQAGQCVVQWFWFGTSAKQTYESCVDFVMG

SEQ ID NO: 206 - protein, 185 aa, Colletotrichum gloeosporioides
  >ELA37169.1 chitin binding protein [Colletotrichum gloeosporioides Nara gc5]
MRTSITAATALLASMVSAHGNIISPPARAPGPAMAKACGQENVQTVLADPTIPLEDLTNPPATCQLDLCRGATFEDNKAQVQTFKAGQVVNMRAALPIPHEGPMNVSIVDTKTNKVIGQPLIVFDSYADEKLAQLPANNTNFDITMPSNLPAGTCAQAGQCVVQWFWFGTSAKQTYESCVDFVMA

SEQ ID NO: 207 - protein, 187 aa, Phialocephala subalpina
  >CZR51345.1 related to chitin binding protein [Phialocephala subalpina]
MRSNILTLAFATLSAGHGIVTKPTARSAGDAMKAVCGQQVTNNLQSNEYGDIEQLSQIGASQKDFDPTACDVSLCKGQQFNDNVANVQTFTPGQVVPITVDIQAKHTGIANVSVVDTATNKMISDALIYFPVYASTSTDLPKNNTQFDITMPDVSGQCGTAGNCVVQWWWNSPDSKQTYMSCVDFTM

SEQ ID NO: 208 - protein, 326 aa, Aureobasidium pullulans
  >KEQ78697.1 hypothetical protein M438DRAFT_307545 [Aureobasidium pullulans EXF-150]
MKYTTTALAVAGMAATVRGHGFLSSPKARMPGTTFQAACGQQVYYNQAGDNYGNIQGELQVAKTQTDYKAAECDVWLCKGFKYEDNKDLVQTYTPGQKVPITFDIRAPHTGTANVSIVDTTTNTIIGAPLISWDVYASTASSIPANETSFDITIPEDLGSKCSTAGACVIQHWWDSREVDQTYESCIDFTVSGSGSGAAPASSKAASSKPASSAVASSSAAPVVSSSAAPVTTNVAKVTSSSSVVAKAPVTSTKAAASSVKPTTMATVVKSSSAAPASSGSASGTVAAYGQCGGKSYTGATQCASGYTCKVQNDYYSQCIAGSAKV

SEQ ID NO: 209 - protein, 253 aa, Cercospora beticola
  >XP_023455052.1 hypothetical protein CB0940_05923 [Cercospora beticola]
MKYLAAVAAFLELVSAHGYFETPIARQPGPAYEAACGSQAYNMMKGDINGNVQGLLQLVANQQDYDAEACGLWLCKGMKFDDNTDNVQTYTAGQEVDLDFAIRAPHSGYANVSIVETATNSIIASDLKKWDEYALTSRPSVASESQFSITIPDNLGSQCSTAGDCVIQMYWNSPPPVDQTYESCIDFTVGGSGSGTSPAPAPVSTTAPAPVPTTTPGSGSGGNTTAPVTPPVANGTTGAGNSTKGGSYQYFCA

SEQ ID NO: 210 - protein, 337 aa, Rhizoctonia solani
  >CEL63233.1 hypothetical protein RSOLAG1IB_05275 [Rhizoctonia solani AG-1 IB]
MFTKAAALIFVSALVGQALGHGLVSSPPIRQPGDAFKANCGEQMFYNVESDPAGNIQQLNQLKATSFSASSCNLNLCKGLQFDDVSAANIQSWTVGQTVPIKVDIRAPHTGSANVSIIDTATNTMIGSPLKTWEVYASVSAPITADQTSFDVTIPDLGDKCKTAGACVLQWWWDAPSITQTYESCIDFTQSGSSAGAPSTPSSAVSSAPAATSAPASSQPAATSAPAETSAPVETSAPAETSAPAETSAAETSAPAETSAAPEPTATSAPATTVVPTTTAAPAASSAPASCGSSLQARDAPSGTKWSQCGGVNYRGSAACDEGLTCTPYNKYYSACL

SEQ ID NO: 211 - protein, 185 aa, Colletotrichum incanum
  >OHW93094.1 chitin binding protein [Colletotrichum incanum]
MRASITAATALLAAMVSAHGNVVSPPARGPGAAMAAACGQENVQAVTTDPTIPLEDLTNPPATCQLDLCRGAKFEDNKANVQTFKPGQVVNMKAEIPIPHEGPMNVSIVDTATNKAIGEPLIVFDSYADEKLAQLPANNTDFDITMPSNLPAGACAQAGQCVVQWFWFGTSAKQTYESCVDFVMG

SEQ ID NO: 212 - protein, 190 aa, Rhizoctonia solani
  >CCO35603.1 hypothetical protein BN14_09721 [Rhizoctonia solani AG-1 IB]
MRGLTFFTSLFIFFNCVLAHGRVKTPPTRTIGSAMLAACGEGPVKAQQIDAAGPIESEIARIGSDFNPAKCNLFFCRGHQFSDNKATIQSYKPGQVVNIDLEIINHHPPGYANVSVIDSATNTRVGQPLIAWNPYFGSGYPYPKSEENFNITIPELNGKCKVAGECVIQYHWYSTGSSQTYQNCIDFTVP

SEQ ID NO: 213 - protein, 222 aa, Cercospora zeina
  >PKR94820.1 hypothetical protein BST61_czeina206g000040 [Cercospora zeina]
MKYLAAIAAFLELVSAHGYFVAPIARQPGPAYEAACGSQAYNMMKGDINGNIQGLLQMVANQPDFDAEACGLWLCKGMEYDDNTDNVQKYTAGQEVPLNFAIRAPHSGYANVSIVETATNSIIAADLKKWDEYALTSRPSVASESEFSITIPDNLGSKCSTAGDCVIQMYWNAPPPVDQTYESCIDFTVGGSGGSGGSPPAPGSGTDGNSTLAKRSYRFFYA

SEQ ID NO: 214 - protein, 204 aa, Mycosphaerella eumusae
  >KXS96251.1 hypothetical protein AC578_5476 [Mycosphaerella eumusae]
MKSVAAVSALVGLVAAHGYYQTPAPRMPGEAYSAACGEQAFNMMSSDINGNIQGLESLVANQDDYDASKCNLWMCKGMKFDDNTANVHSFSAGEEIPMYFQIVAPHTGYANVSVVDTATNSILAANLTSWDEYASTSVQMKTEWQNFTVTMPPTLSGKCATAGECVIQMHWNAPPPVDQTYQSCIDFTLAGSSGSKRSHARDFS

SEQ ID NO: 215 - protein, 283 aa, Penicillium oxalicum
  >EPS25375.1 chitin binding domain-containing protein [Penicillium oxalicum 114-2]
MKSFTATAAALAALLPLVHGHGFVTSPKPRMPGAAMKAACGNQVEINQQSDNYGNIQGELQIAANQNDYNAAECDIWLCKGYKLEDNMDNVYSYTAGQTIDFKVAIHAPHTGVANVSVVDTASNSVIGQPLISWDVYASVATGVKADETSFKVTLPDNLDSKCSTAGACVLQWYWFAESIDQTYESCIDFTVGGGSGSGSGSGSSSSASTTSMPAPAQTTAVAQISSSIQPLTTLATQARQGSTPTSAANSNGATVPTGAIPTDSAQDTLDYVRAVFKYLAGN

SEQ ID NO: 216 - protein, 229 aa, Verruconis gallopava
  >XP_016211708.1 hypothetical protein PV09_06689 [Verruconis gallopava]
MTSKNFAALAALATVVAAHGNITSPPARTPGPAMAAACGQPAVDSALSDGTTPLEDIDMSAATASCQLSLCRGATFEDNRANVQTYSAGQTIRMLAQLPIPHEGPMNVSIVDTSTNTVIGEPLIEFASYADENLPALPANNTDFSVTMPQLADGQCAQAGQCTIQWFWFGTKAQQTYESCVDFVMASANASAMTSAATSATGSAVPAADASSGTASGFSFVYRARRFRV

SEQ ID NO: 217 - protein, 416 aa, Fusarium fujikuroi
  >KLO89510.1 uncharacterized protein LW93_1569 [Fusarium fujikuroi]
  UNSURE 248: Xaa can be any amino acid
MKNAAALLTLLPLVAAHGFVKSPPPRKPGNAFKAACGEQPFYQQEADINGNVQGIKQVVGSNFDAKECNLWLCKGFQFDDNKDNVQSYKLGEKIDFDVNIAAPHTGYANVSVVKTSTDKMIGEPLIEFENYAANAGLNPNNTAFSVTLPESLGGECTKAGDCVLQWFWDAPDIDQTYESCVDFVVGAGSGSGSGSGSTKPSSAASAAPVATSAPAAEKPSATTLEAVAVTSSALGPIFESVTTAVPEXAGDDEDCDDEEPVDEGDDEDCDDEDEPTPSAAAETGDDEDCDEDEEPETGDDDEECPADDGDEYDTQPATPSNTAQGISAAANTAAVTKTKDNAYPVPKPTGQSSSDKTGSGSKGSNNNNNAGSNNNYGNAGSNNNAGSNTIVTSYVTVSAAETHYVTVTADTPACTA

SEQ ID NO: 218 - protein, 322 aa, Rhizoctonia solani
  >KEP52961.1 chitin-binding domain protein [Rhizoctonia solani 123E]
MFNKLAALTFVSALVGQVMGHGLVTDPPIRQVGDAFKANCGEQMFYNIQSDAAGNIQQLNQLKASSFSGTSCNLNLCKGLQFADVAAANIQSWTAGQVVPIKVDIRAPHTGTANVSIIDTASNTMIGSPLKVFESYASTSSPITADQTSFSVTIPDLGSKCNTAGACVLQWWWDARSVDQTYESCVDFTLSGSGEGAPAATSTTASSSAVASTSAATSAAATSAAESTSTAEPTSTAEPTTTVKPTIVTSTATAEPTIKASTTSAAPATTSTAVPCGSKIQAREVRIHAKYARCGGNGWFGDNSCPEGLTCHAYNDYYSACI

SEQ ID NO: 219 - protein, 422 aa, Fusarium fujikuroi
  >SCO39605.1 uncharacterized protein FFNC_06939 [Fusarium fujikuroi]
MKNAAALLTLLPLVAAHGFVKSPPPRKPGNAFKAACGEQPFYQQEADINGNVQGIKQVVGSNFDAKECNLWLCKGFQFDDNKDNVQSYKLGEKIDFDVNIAAPHTGYANVSVVKTSTDKMIGEPLIEFENYAANAGLNPNNTAFSVTLPESLGGECTKAGDCVLQWFWDAPDIDQTYESCVDFVVGAGSGSGSGSGSTKPSSAASAAPVATSAPAAEKPSATTLEAVAVTSSALGPIFESVTTAVPEPTATAPDAGDDEDCDDEEPVDEGDDEDCDDEDEPTPSAAAETGDDEDCDEDEEPETGDDDEECPADDGDEYDTQPATPSNTAQGISAAANTAAVTKTKDNAYPVPKPTGQSSSDKTGSGSKGSNNNNNAGSNNNYGNAGSNNNAGSNTIVTSYVTVSAAETHYVTVTADAPACTA

SEQ ID NO: 220 - protein, 185 aa, Colletotrichum graminicola
  >XP_008099317.1 hypothetical protein GLRG_10441 [Colletotrichum graminicola M1.001]
MRSSITAATALLAAMVSAHGNVVSPPAREPGAAMAAACGQANVQTVTEDPTIPLEDLVNPPATCQVDLCRGAKFEDNKANVQTFTPGQVVNMKAEIPIPHEGPMNVSIVDTATNKVIGEPLIVFDSYADENLAELPANNTNFNITMPSNLPAGTCAEGGACVVQWFWFGTNAKQTYESCVDFVMA

SEQ ID NO: 221 - protein, 422 aa, Fusarium proliferatum
  >CZR40388.1 uncharacterized protein FPRO_05288 [Fusarium proliferatum ET1]
MKNAAALLTLLPLVAAHGFVKSPPPRKPGNAFKAACGEQPFYQQEADINGNVQGIKQVVGSNFDAKECNLWLCKGFQFDDNKDNVQSYKLGEKIDFDVNIAAPHTGYANVSVVKTSTDKMIGEPLIEFENYAANAGLNPNNTAFSVTLPESLGGECTKAGDCVLQWFWDAPDIDQTYESCVDFVVGAGSGSGSGSGSTKPSSAASAAPVATSAPAAEKPSATTLEAVAVTSSALGPIFESVTTAVPEPTATAPDASDDEDCDDEEPVDEGDDEDCDDEDEPTPSAAAETGDDEDCDEDEEPETGDDDEECPADDGDEYDTQPATPSNTAQGISAAANTAAVTKTKDNAYPVPKPTGQSSSDKTGSGSKGSNNNNAGSSNNNYGNAGSNNNAGSNTIVTSYVIVSAAETHYVTVTADAPACTA

SEQ ID NO: 222 - protein, 423 aa, Fusarium fujikuroi
  >SCV25327.1 uncharacterized protein FFB14_00220 [Fusarium fujikuroi]
MKNAAALLTLLPLVAAHGFVKSPPPRKPGNAFKAACGEQPFYQQEADINGNVQGIKQVVGSNFDAKECNLWLCKGFQFDDNKDNVQSYKLGEKIDFDVNIAAPHTGYANVSVVKTSTDKMIGEPLIEFENYAANAGLNPNNTAFSVTLPESLGGECTKAGDCVLQWFWDAPDIDQTYESCVDFVVGAGSGSGSGSGSTKPSSAASAAPVATSAPAAEKPSATTLEAVAVTSSALGPIFESVTTAVPEPTATAPDAGDDEDCDDEEPVDEGDDEDCDDEDEPTPSAAAETGDDEDCDEDEEPETGDDDEECPADDGDEYDTQPATPSNTAQGISAAANTAAVTKTKDNAYPVPKPTGQSSSDKTGSGSKGSNNNNNAGSNNNNYGNAGSNNNAGSNTIVTSYVTVSAAETHYVTVTADAPACTA

SEQ ID NO: 223 - protein, 422 aa, Fusarium fujikuroi
  >SCV29635.1 uncharacterized protein FFFS_01886 [Fusarium fujikuroi]
  UNSURE 341: Xaa can be any amino acid
MKNAAALLTLLPLVAAHGFVKSPPPRKPGNAFKAACGEQPFYQQEADINGNVQGIKQVVGSNFDAKECNLWLCKGFQFDDNKDNVQSYKLGEKIDFDVNIAAPHTGYANVSVVKTSTDKMIGEPLIEFENYAANAGLNPNNTAFSVTLPESLGGECTKAGDCVLQWFWDAPDIDQTYESCVDFVVGAGSGSGSGSGSTKPSSAASAAPVATSAPAAEKPSATTLEAVAVTSSALGPIFESVTTAVPEPTATAPDAGDDEDCDDEEPVDEGDDEDCDDEDEPTPSAAAETGDDEDCDEDEEPETGDDDEECPADDGDEYDTQPATPSNTAQGISAAANTAAXTKTKDNAYPVPKPTGQSSSDKTGSGSKGSNNNNNAGSNNNYGNAGSNNNAGSNTIVTSYVTVSAAETHYVTVTADAPACTA

SEQ ID NO: 224 - protein, 422 aa, Fusarium proliferatum
  >CVL06583.1 uncharacterized protein FPRN_05131 [Fusarium proliferatum]
MKNAAALLTLLPLVAAHGFVKSPPPRKPGNAFKAACGEQPFYQQEADINGNVQGIKQVVGSNFDAKECNLWLCKGFQFDDNKDNVQSYKLGEKIDFDVNIAAPHTGYANVSVVKTSTDKMIGEPLIEFENYAANAGLNPNNTAFSVTLPESLGGECTKAGDCVLQWFWDAPDIDQTYESCVDFVVGAGSGSGSGSGSTKPSSAASAAPVATSAPAAEKPSATTLEAVAVTSSALGPIFESVTTAVPEPTATAPDAGDDEDCDDEEPVDEGDDEDCDDEDEPTPSAAAETGDDEDCDEDEEPETGDDDEECPADDGDEYDTQPATPSNTAQGISAAANTAAVTKTKDNAYPVPKPTGQSSSDKTGSGSKGSNNNNAGSSNNNYGNAGSNNNAGSNTIVTSYVTVSAAETHYVTVTADAPACTA

SEQ ID NO: 225 - protein, 420 aa, Aureobasidium pullulans
  >OBW64480.1 Uncharacterized protein AUREO_054520 [Aureobasidium pullulans]
MKYTTTALAVAGMAATVRGHGFLSSPKARMPGTAFQAACGQQVYYNQAGDNYGNVQGELQVAKTQTDYKAAECDIWLCKGFKYEDNKDLVQTYTAGQKVPIKFEVRAPHTGTANVSIVDTATNTIIGTPLISWDVYASTASGVPADQTSFDITIPEDLGSKCSTAGACVIQHWWDSREVDQTYESCIDFTVSGSGSGAAPASSKAASSKPASSAVASSSAAPVVSSSAAPVTTNVAKVTSSSSVVAKAPVTSTKAAASSVKPTTMATVVKSSSAAPASSGSASGTVAAYGQCGGKSYTGATQCASGYTCKVQNDYYSQCIAGSAKVIDASSAASSTSCTSTITITKSSSAATSTGADSASTGVNLSDAVKAISTGVPSAALTATATGAAPTGTAKPIPEGFTLKDCLDWINYIVSNAGQQ

SEQ ID NO: 226 - protein, 302 aa, Fusarium oxysporum
  >EWZ43646.1 hypothetical protein FOZG_04727 [Fusarium oxysporum Fo47]
MKNAAALLTLLPLVAAHGFVKSPPPRKPGNAFKAACGEQPFYQQSADINGNVQGIKQVVGSNFDAKDCNLWLCKGFQFDDNKDNVQSYKLGEKIDFDVNIAAPHTGYANVSVVKTSTDKMIGEPLIEFENYAANAGLNPNNTAFSVTLPESLGGECTKAGDCVLQWFWDAPDIDQTYESCVDFVVGAGSGSGSGSGSTKPSSAASAAPVATSAPAAEKPATTLEAVAVTSSALGPVFESVTTAVPEPTAAAPDAGDDEDCDDEDEPTPSAAAETGDDEDCDEDEEPETGDDEECPADDGDDY

SEQ ID NO: 227 - protein, 316 aa, Fusarium verticillioides
  >XP_018750822.1 hypothetical protein FVEG_05642 [Fusarium verticillioides 7600]
MKNAAALLTLLPLVAAHGFVKSPPPRKPGNAFKAACGDQPFYQQSADINGNVQGIKQVVGSNFDAKECNLWLCKGFQFDDNKDNVQSYKLGEKIDFDVNIAAPHTGYANVSVVKTSTDKMIGEPLIEFENYAANAGLNPNNTAFSVTLPESLGGECTKAGDCVLQWFWDAPDINQTYESCVDFVVGAGSGSGSGSTKPSSAASAAPVATSAPAAEKPTATTLQAVAVTSSALGPIFESVTTAVPEPTATTPDAGDDEDCDDEEPVDEGDDEDCDDEEEPTPTAAAETGDDEDCDEDEEPETGDDDEECPADDGDDY

SEQ ID NO: 228 - protein, 316 aa, Fusarium oxysporum
  >XP_018236038.1 hypothetical protein FOXG_02457 [Fusarium oxysporum f. sp. lycopersici 4287]
MKNAAALLTLLPLVAAHGFVKSPPPRKPGNAFKAACGEQPFYQQSADINGNVQGIKQVVGSNFDAKDCNLWLCKGFQFDDNKDNVQSYKLGEKIDFDVNIAAPHTGYANVSVVKTSTDKMIGEPLIEFENYAANAGLNPNNTAFSVTLPESLGGECTKAGDCVLQWFWDAPDIDQTYESCVDFVVGAGSGSGSGSGSTKPSSAASAAPVATSAPAAEKPATTLEAVAVTSSALGPVFESVTTAVPEPTAAAPDAGDDEDCDDEEPVDEGDDEDCDDEDEPTPSAAAATGDDEDCDEDEEPETGDDEECPADDGDDY

SEQ ID NO: 229 - protein, 316 aa, Fusarium oxysporum
  >EXA48926.1 hypothetical protein FOVG_02255 [Fusarium oxysporum f. sp. pisi HDV247]
MKNAAALLTLLPLVAAHGFVKSPPPRKPGNAFKAACGEQPFYQQSADINGNVQGIKQVVGSNFDAKDCNLWLCKGFQFDDNKDNVQSYKLGEKIDFDVNIAAPHTGYANVSVVKTSTDKMIGEPLIEFENYAANAGLNPNNTAFSVTLPESLGGECTKAGDCVLQWFWDAPDIDQTYESCVDFVVGAGSGSGSGSGSTKPSSAASAAPVATSAPAAEKPATTLEAVAVTSSALGPVFESVTTAVPEPTAAAPDAGDDEDCDDEEPVDEGDDEDCDDEDEPTPSAAAETGDDEDCDEDEEPETGDDEECPADDGDDY

SEQ ID NO: 230 - protein, 314 aa, Fusarium oxysporum
  >EXM24440.1 hypothetical protein FOTG_08445 [Fusarium oxysporum f. sp. vasinfectum 25433]
MKNAAALLTLLPLVAAHGFVKSPPPRKPGNAFKAACGEQPFYQQSADINGNVQGIKQVVGSNFDAKDCNLWLCKGFQFDDNKDNVQSYKLGEKIDFDVNIAAPHTGYANVSVVKTSTDKMIGEPLIEFENYAANAGLNPNNTAFSVTLPESLGGECTKAGDCVLQWFWDAPDIDQTYESCVDFVVGAGSGSGSGSTKPSSAASAAPVATSAPAAEKPATTLEAVAVTSSALGPVFESVTTAVPEPTAAAPDAGDDENCDDEEPVDEGDDEDCDDEDEPTPSAAAETGDDEDCDEDEEPETGDDDECPADDGDDY

SEQ ID NO: 231 - protein, 315 aa, Fusarium oxysporum
  >EXK40995.1 hypothetical protein FOMG_04550 [Fusarium oxysporum f. sp. melonis 26406]
MKNAAALLTLLPLVAAHGFVKSPPPRKPGNAFKAACGEQPFYQQSADINGNVQGIKQVVGSNFDAKDCNLWLCKGFQFDDNKDNVQSYKLGEKIDFDVNIAAPHTGYANVSVVKTSTDKMIGEPLIEFENYAANAGLNPNNTAFSVTLPESLGGECTKAGDCVLQWFWDAPDIDQTYESCVDFVVGAGSGSGSGSGSTKPSSAASAAPVATSAPAAEKPATTLEAVAVTSALGPVFESVTTAVPEPTAAAPDAGDDEDCDDEEPVDEGDDEDCDDEDEPTPSAAAATGDDEDCDEDEEPETGDDEECPADDGDDY

SEQ ID NO: 232 - protein, 316 aa, Fusarium oxysporum
  >EWY97569.1 hypothetical protein FOYG_02390 [Fusarium oxysporum FOSC 3-a]
MKNAAALLTLLPLVAAHGFVKSPPPRKPGNAFKAACGEQPFYQQSADINGNVQGIKQVVGSDFDAKDCNLWLCKGFQFDDNKDNVQSYKLGEKIDFDVNIAAPHTGYANVSVVKTSTDKMIGEPLIEFENYAANAGLNPNNTAFSVTLPESLGGECTKAGDCVLQWFWDAPDIDQTYESCVDFVVGAGSGSGSGSGSTKPSSAASAAPVATSAPAAEKPATTLEAVAVTSSALGPVFESVTTAVPEPTAATPDAGDDEDCDDEEPVDEGDDEDCDDEDEPTPSAAAATGDDEDCDEDEEPETGDDEECPADDGDDY

SEQ ID NO: 233 - protein, 278 aa, Fusarium graminearum
  >PCD25566.1 hypothetical protein FGRA07_10971 [Fusarium graminearum]
MKNAAAILALIPLVAAHGFIKSPAPRRPGDAYKAACGDQPFYQQSSDINGNVQGIKQVVGQDFKAADCNLWLCKGFQFDDNKDNVQKYSLGEKIPFEINIAAPHTGYANVSVVKTSSDTMIGEPLIEFENYAANAGTASNNTAFSVTLPTSLGGDCTKAGECVLQWFWDAPDINQTYESCVDFVVGAGSGSAPAPSSGSGAEKPATSAPAAEQPAATSAAAEADDEDCDDEEEPAASTTAVAEKPAATTLQALTLTMHFTPAQSSLPRPLRPNKLNPN

SEQ ID NO: 234 - protein, 414 aa, Fusarium mangiferae
  >CVK88214.1 uncharacterized protein FMAN_05061 [Fusarium mangiferae]
MKNAAALLTLLPLVAAHGFVKSPPPRKPGNAFKAACGEQPFYQQSADINGNVQGIKQVVGSNFDAKECNLWLCKGFQFDDNKDNVQSYKLGEKIDFDVNIAAPHTGYANVSVVKTSTDKMIGEPLIEFENYAANAGLNPNNTAFSVTLPESLGGECTKAGDCVLQWFWDAPDIDQTYESCVDFVVGAGSGSGSGSGSTKPSSAASAAPVATSAPAAEKPSATTLEAVAVTSSALGPVFESVTTAVPEPTATTPDAGDDEDCDDEEPVDEGDDEDCEDEDEPTPSAAAETGDDEDCDEDEEPETGDDDECPADDGDEYDTQPATPSNTAQGISAAANTAAVTKTQDNAYPVPKPTGQSSSDKTGSGSKGSNNNNAGGNNNYGNAGSNTIVTSYVTVSAAETHYVTVTADAPACTA

SEQ ID NO: 235 - protein, 425 aa, Fusarium nygamai
  >PNP82245.1 hypothetical protein FNYG_04434 [Fusarium nygamai]
MKNAAALLTLLPLVAAHGFVKSPPPRKPGNAFKAACGEQPFYQQSADINGNVQGIKQVVGSNFDAKECNLWLCKGFQFDDNKDNVQSYKLGEKIDFDVNIAAPHTGYANVSVVKTSTDKMIGEPLIEFENYAANAGLNPNNTAFSVTLPESLGGECTKAGDCVLQWFWDAPDIDQTYESCVDFVVGAGSGSGSGSGSGSTKPSSAASAAPVATSAPAAEKPTATTLQAVAVTSSALGPVFESVTTAVPEPTATTPDAGDDEDCDDEEPVDQGDDEDCDDEEPTPSAAAETGDDEDCDEDEEPETGDDDEECPADDGDEYDTQPATPSNTAQGISAAANTAAVTKTQNNAYPVPKPTGHSSSDKTGSGSKGSNNNNNAGSNYNNYGNSGSNNNNAGSNTIMTSYVTVSAAETHYVTVTADAPACTA

SEQ ID NO: 236 - protein, 411 aa, Fusarium verticillioides
  >XP_018750821.1 hypothetical protein FVEG_05642 [Fusarium verticillioides 7600]
MKNAAALLTLLPLVAAHGFVKSPPPRKPGNAFKAACGDQPFYQQSADINGNVQGIKQVVGSNFDAKECNLWLCKGFQFDDNKDNVQSYKLGEKIDFDVNIAAPHTGYANVSVVKTSTDKMIGEPLIEFENYAANAGLNPNNTAFSVTLPESLGGECTKAGDCVLQWFWDAPDINQTYESCVDFVVGAGSGSGSGSTKPSSAASAAPVATSAPAAEKPTATTLQAVAVTSSALGPIFESVTTAVPEPTATTPDAGDDEDCDDEEPVDEGDDEDCDDEEEPTPTAAAETGDDEDCDEDEEPETGDDDEECPADDGDEYDTQPATPSNTAQGISAAANTAAVTKTRHNAYPVPKPTGQSSSDKTGSGSKGSNNNNNAGSNNNAGSNTIVTSYVTVSAAETHYVTVTADAPACTA

SEQ ID NO: 237 - protein, 404 aa, Fusarium oxysporum
  >EXL60969.1 hypothetical protein FOCG_00230 [Fusarium oxysporum f. sp. radicis-lycopersici 26381]
MKNAAALLTLLPLVAAHGFVKSPPPRKPGNAFKAACGEQPFYQQSADINGNVQGIKQVVGSNFDAKDCNLWLCKGFQFDDNKDNVQSYKLGEKIDFDVNIAAPHTGYANVSVVKTSTDKMIGEPLIEFENYAANAGLNPNNTAFSVTLPESLGGECTKAGDCVLQWFWDAPDIDQTYESCVDFVVGAGSGSGSGSGSTKPSSAASAAPVATSAPAAEKPATTLEAVAVTSSALGPVFESVTTAVPEPTAAAPDAGDDEDCDDEDEPTPSAAAETGDDEDCDEDEEPETGDDEECPADDGDEYDTQPATPSNTAQGISAAANTAAVTKTQSNAYPVPKPTGKSSSDKTGSGSKGSNNNAGSNNNYGNAGSNNNNAGSNTVVTSYVTVAAETHYVTVTADAPACTA

SEQ ID NO: 238 - protein, 316 aa, Fusarium oxysporum
  >EXK88430.1 hypothetical protein FOQG_08260 [Fusarium oxysporum f. sp. raphani 54005]
MKNAAALLTLLPLVAAHGFVKSPPPRKPGNAFKAACGEQPLYQQSADINGNVQGIKQVVGSNFDAKDCNLWLCKGFQFDDNKDNVQSYKLGEKIDFDVNIAAPHTGYANVSVVKTSTDKMIGEPLIEFENYAANAGLNPNNTAFSVTLPESLGGECTKAGDCVLQWFWDAPDIDQTYESCVDFVVGAGSGSGSGSGSTKPSSAASAAPVATSAPAAEKPATTLEAVAVTSSALGPVFESVTTAVPEPTAAAPDAGDDEDCDDEEPVDEGDDEDCDDEDEPTPSAAAETGDDEDCDEDEEPETGDDEECPADDGDDY

SEQ ID NO: 239 - protein, 404 aa, Fusarium oxysporum
  >EWZ43645.1 hypothetical protein FOZG_04727 [Fusarium oxysporum Fo47]
MKNAAALLTLLPLVAAHGFVKSPPPRKPGNAFKAACGEQPFYQQSADINGNVQGIKQVVGSNFDAKDCNLWLCKGFQFDDNKDNVQSYKLGEKIDFDVNIAAPHTGYANVSVVKTSTDKMIGEPLIEFENYAANAGLNPNNTAFSVTLPESLGGECTKAGDCVLQWFWDAPDIDQTYESCVDFVVGAGSGSGSGSGSTKPSSAASAAPVATSAPAAEKPATTLEAVAVTSSALGPVFESVTTAVPEPTAAAPDAGDDEDCDDEDEPTPSAAAETGDDEDCDEDEEPETGDDEECPADDGDEYDTQPATPSNTAQGISAAANTAAVTKTQSNAYPVPKPTGKSSSDKTGSGSKGSNNNAGSNSNYGNAGSNNNNAGSNTVVTSYVTVAAETHYVTVTADAPACTA

SEQ ID NO: 240 - protein, 418 aa, Fusarium oxysporum
  >EGU82471.1 hypothetical protein FOXB_07057 [Fusarium oxysporum Fo5176]
MKNAAALLTLLPLVAAHGFVKSPPPRKPGNAFKAACGEQPFYQQSADINGNVQGIKQVVGSNFDAKDCNLWLCKGFQFDDNKDNVQSYKLGEKIDFDVNIAAPHTGYANVSVVKTSTDKMIGEPLIEFENYAANAGLNPNNTAFSVTLPESLGGECTKAGDCVLQWFWDAPDIDQTYESCVDFVVGAGSGSGSGSGSTKPSSAASAAPVATSAPAAEKPATTLEAVAVTSSALGPVFESVTTAVPEPTAAAPDAGDDEDCDDEEPVDEGDDEDCDDEDEPTPSAAAETGDDEDCDEDEEPETGDDEECPADDGDEYDTQPATPSNTAQGISAAANTAAVTKTQNNAYPVPKPTGKSSSDKTGSGSKGSNNNAGSNNNYGNAGSNNNNAGSNTVVTSYVTVAAETHYVTVTADAPACTA

SEQ ID NO: 241 - protein, 418 aa, Fusarium oxysporum
  >XP_018236037.1 hypothetical protein FOXG_02457 [Fusarium oxysporum f. sp. lycopersici 4287]
MKNAAALLTLLPLVAAHGFVKSPPPRKPGNAFKAACGEQPFYQQSADINGNVQGIKQVVGSNFDAKDCNLWLCKGFQFDDNKDNVQSYKLGEKIDFDVNIAAPHTGYANVSVVKTSTDKMIGEPLIEFENYAANAGLNPNNTAFSVTLPESLGGECTKAGDCVLQWFWDAPDIDQTYESCVDFVVGAGSGSGSGSGSTKPSSAASAAPVATSAPAAEKPATTLEAVAVTSSALGPVFESVTTAVPEPTAAAPDAGDDEDCDDEEPVDEGDDEDCDDEDEPTPSAAAATGDDEDCDEDEEPETGDDEECPADDGDEYDTQPATPSNSAQGISAAANTAAVTKTQNNAYPVPKPTGKSSSDKTGSGSKGSNNNAGSNNNYGNAGSNNNNAGSNTVVTSYVTVAAETHYVTVTADAPACTA

SEQ ID NO: 242 - protein, 311 aa, Fusarium graminearum
  >XP_011326115.1 hypothetical protein FGSG_06506 [Fusarium graminearum PH-1]
MKNAAAILALIPLVAAHGFIKSPAPRRPGDAYKAACGDQPFYQQSSDINGNVQGIKQVVGQDFKAADCNLWLCKGFQFDDNKDNVQKYSLGEKIPFEINIAAPHTGYANVSVVKTSSDTMIGEPLIEFENYAANAGTASNNTAFSVTLPTSLGGDCTKAGECVLQWFWDAPDINQTYESCVDFVVGAGSGSAPAPSSGSGAEKPATSAPAAEQPAATSAAAEADDEDCDDEEEPAASTTAVAEKPAATTLQAVAISSAADSGSAQPTSAPGSDDDEDCDDEEPIADEDEDCDEEDDQDAGDEDEECPADDY

SEQ ID NO: 243 - protein, 416 aa, Fusarium oxysporum
  >SCO82868.1 uncharacterized protein FRV6_07081 [Fusarium oxysporum]
MKNAAALLTLLPLVAAHGFVKSPPPRKPGNAFKAACGEQPFYQQSADINGNVQGIKQVVGSNFDAKDCNLWLCKGFQFDDNKDNVQSYKLGEKIDFDVNIAAPHTGYANVSVVKTSTDKMIGEPLIEFENYAANAGLNPNNTAFSVTLPESLGGECTKAGDCVLQWFWDAPDIDQTYESCVDFVVGAGSGSGSGSTKPSSAASAAPVATSAPAAEKPATTLEAVAVTSSALGPVFESVTTAVPEPTAAAPDAGDDEDCDDEEPVDEGDDEECDDEDEPTPSAAAETGDDEDCDEDEEPETGDDDECPADDGDEYDTQPATPSNTAQGISAAANTAAVTKTQNNAYPVPKPTGKSSSDKTGSGSKGSNNNAGSNNNYGNAGSNNNNAGSNTVVTSYVTVAAETHYVTVTADAPACTA

SEQ ID NO: 244 - protein, 417 aa, Fusarium oxysporum
  >EXK40994.1 hypothetical protein FOMG_04550 [Fusarium oxysporum f. sp. melonis 26406]
MKNAAALLTLLPLVAAHGFVKSPPPRKPGNAFKAACGEQPFYQQSADINGNVQGIKQVVGSNFDAKDCNLWLCKGFQFDDNKDNVQSYKLGEKIDFDVNIAAPHTGYANVSVVKTSTDKMIGEPLIEFENYAANAGLNPNNTAFSVTLPESLGGECTKAGDCVLQWFWDAPDIDQTYESCVDFVVGAGSGSGSGSGSTKPSSAASAAPVATSAPAAEKPATTLEAVAVTSALGPVFESVTTAVPEPTAAAPDAGDDEDCDDEEPVDEGDDEDCDDEDEPTPSAAAATGDDEDCDEDEEPETGDDEECPADDGDEYDTQPATPSNSAQGISAAANTAAVTKTQNNAYPVPKPTGKSSSDKTGSGSKGSNNNAGSNNNYGNAGSNNNNAGSNTVVTSYVTVAAETHYVTVTADAPACTA

SEQ ID NO: 245 - protein, 183 aa, Magnaporthe oryzae
  >XP_003718861.1 hypothetical protein MGG_00245 [Magnaporthe oryzae 70-15]
MFAKLAIVSALVATVLAHGNITVPPCRLAGAAMAKACGQAGVSAVQADGTIPLEDVKVTGANCNLSLCRGAVFEDNKDRLQTFKAGQVIQMKAAIPIPHEGPCNVSIIDTKSNKAIGQPLIFFDSYADEKLPKLPANNTAFSVTMPKLKANQCTTGGECVLQWHWVGTAAKQTYQSCVDFVQG

SEQ ID NO: 246 - protein, 416 aa, Fusarium oxysporum
  >ENH69853.1 hypothetical protein FOC1_g10009356 [Fusarium oxysporum f. sp. cubense race 1]
MKNAAALLTLLPLVAAHGFVKSPPPRKPGNAFKAACGEQPFYQQSADINGNVQGIKQVVGSNFDAKDCNLWLCKGFQFDDNKDNVQSYKLGEKIDFDVNIAAPHTGYANVSVVKTSTDKMIGEPLIEFENYAANAGLNPNNTAFSVTLPESLGGECTKAGDCVLQWFWDAPDIDQTYESCVDFVVGAGSGSGSGSTKPSSAASAAPVATSAPADEKPATTLEAVAVTSSALGPVFESVTTAVPEPTAAAPDAGDDENCDDEEPVDEGDDEDCDDEDEPTPSAAAETGDDEDCDEDEEPETGDDDECPADDGDEYDTQPATPSNTAQGISAAANTAAVTKTQNNAYPVPKPTGKSSSDKTGSGSKGSNNNAGSNNNYGNAGSNNNNAGSNTVVTSYVTVAAETHYVTVTADAPACTA

SEQ ID NO: 247 - protein, 185 aa, Colletotrichum chlorophyti
  >OLN88021.1 hypothetical protein CCHL11_00270 [Colletotrichum chlorophyti]
MRASVTAATALLAAMVSAHGNITSPLAREAGPAMAAACGQANVQAVTADPTIPLEDLTDPPATCQVNLCRGAKFEDNMANVQTFKPGQVVNMRANIPIPHEGPMNVSIVDTAKNQVIGEPLIVFDSYADEKLPQLPANNTNFDVTMPANLPAGTCTQAGQCVMQWFWFGTNAKQTYESCVDFVMG

SEQ ID NO: 248 - protein, 268 aa, Marssonina brunnea
  >XP_007289412.1 hypothetical protein MBM_01523 [Marssonina brunnea f. sp. 'multigermtubi' MB_m1]
MQYSSSLVAVAGLLTTVAGHGSLISPTPRPVGEAYRAVCGQQVYNQQLSDRNGNIQGILQVARSQSDFTEECDVWLCKGFQFADNSANVQTYTAGQEVPMTFNIAAPHTGPANVSIVHVPTGTLIGDPLITWAEYASNAVGPKADQRDFTVTIPSDLGNQCATAGDCVLQHWWDARSVDQTYESCVDFTVGGGSGTTPSTPPANRPATPPADRPVAPVEVASNPSTMVTSRKPAPTVPPANRPAPATPPTTSNTELKEEEEEEDEECD

SEQ ID NO: 249 - protein, 416 aa, Fusarium oxysporum
  >EXM24439.1 hypothetical protein FOTG_08445 [Fusarium oxysporum f. sp. vasinfectum 25433]
MKNAAALLTLLPLVAAHGFVKSPPPRKPGNAFKAACGEQPFYQQSADINGNVQGIKQVVGSNFDAKDCNLWLCKGFQFDDNKDNVQSYKLGEKIDFDVNIAAPHTGYANVSVVKTSTDKMIGEPLIEFENYAANAGLNPNNTAFSVTLPESLGGECTKAGDCVLQWFWDAPDIDQTYESCVDFVVGAGSGSGSGSTKPSSAASAAPVATSAPAAEKPATTLEAVAVTSSALGPVFESVTTAVPEPTAAAPDAGDDENCDDEEPVDEGDDEDCDDEDEPTPSAAAETGDDEDCDEDEEPETGDDDECPADDGDEYDTQPATPSNTAQGISAAANTAAVTKTQNNAYPVPKPTGKSSSDKTGSGSKGSNNNAGSNNNYGNAGSNNNNAGSNTVVTSYVTVAAETHYVTVTADAPACTA

SEQ ID NO: 250 - protein, 416 aa, Fusarium oxysporum
  >EWY97568.1 hypothetical protein FOYG_02390 [Fusarium oxysporum FOSC 3-a]
MKNAAALLTLLPLVAAHGFVKSPPPRKPGNAFKAACGEQPFYQQSADINGNVQGIKQVVGSDFDAKDCNLWLCKGFQFDDNKDNVQSYKLGEKIDFDVNIAAPHTGYANVSVVKTSTDKMIGEPLIEFENYAANAGLNPNNTAFSVTLPESLGGECTKAGDCVLQWFWDAPDIDQTYESCVDFVVGAGSGSGSGSGSTKPSSAASAAPVATSAPAAEKPATTLEAVAVTSSALGPVFESVTTAVPEPTAATPDAGDDEDCDDEEPVDEGDDEDCDDEDEPTPSAAAATGDDEDCDEDEEPETGDDEECPADDGDEYDTQPATPSNTAQGISAAANTAAVTKTQNNAYPVPKPTGKSSSDETGSGSKGSNNAGSNNYGNAGSNNSNAGSNTVVTSYVTVAAETHYVTVTAEAPACTA

SEQ ID NO: 251 - protein, 192 aa, Heterobasidion irregulare
  >XP_009548994.1 hypothetical protein HETIRDRAFT_324730 [Heterobasidion irregulare TC 32-1]
MDFFVKSIILAGFIGQALAHGVVTSPSPRKIGSAAKSACGTAVYSALASDKYGPIENAAKKIDDTYNAEACHLFFCKGYQYEDNAANTRVYTAGQVVNMQVDLAAHHTGHANVSVVNLSSQTTIGKPLYLWPVYANSSLGPSKWPTNETNFNVTIPDLGDECTTAGACAIQWWWYADSNGQTYESCVDFTTE

SEQ ID NO: 252 - protein, 250 aa, Ophiocordyceps camponoti-rufipedis
  >PHH72363.1 hypothetical protein CDD80_4588 [Ophiocordyceps camponoti-rufipedis]
MRSTLFTLAAFATSVAGHGRVIQPPARAPGAAMVKACGQAAVAVMQKDISSPLEEMKGATCNLDLCGGATFEDNKDKVQSFKAGQVINYRVEIPIKHKGPCNVSIVDTATNKAIGQPLIQFDSYADENLPQLPANNTNFNVMMPQLREGQCAQPGQCVMQWFWVGNQEKDNQTYVNCNDFVQEGGQAAAQGARAQNTGGQGGQGAPRPQGNPGAQGPQGPQGNPGNPGPQGPQRAPVPQANQAPRGNQAP

SEQ ID NO: 253 - protein, 186 aa, Diaporthe ampelina
  >KKY34048.1 putative chitin binding protein [Diaporthe ampelina]
MKASIVSASLFAAAVSAHGNITSPPARQAGAAMAAVCGQDAVDTINADPTIPLEDVTAGSTQCNLGLCRGAVFEDNAEQVQQFAPGQVVEMEAFLPIPHAGPMNTSIVDTATNTVVGQPLISFDVYADESLAQLPDNNTDFSVTMPTDLPATQCAVAGECVLQWFWFGTNAKQTYESCVDFVMVQQ

SEQ ID NO: 254 - protein, 418 aa, Fusarium oxysporum
  >EXK88429.1 hypothetical protein FOQG_08260 [Fusarium oxysporum f. sp. raphani 54005]
MKNAAALLTLLPLVAAHGFVKSPPPRKPGNAFKAACGEQPLYQQSADINGNVQGIKQVVGSNFDAKDCNLWLCKGFQFDDNKDNVQSYKLGEKIDFDVNIAAPHTGYANVSVVKTSTDKMIGEPLIEFENYAANAGLNPNNTAFSVTLPESLGGECTKAGDCVLQWFWDAPDIDQTYESCVDFVVGAGSGSGSGSGSTKPSSAASAAPVATSAPAAEKPATTLEAVAVTSSALGPVFESVTTAVPEPTAAAPDAGDDEDCDDEEPVDEGDDEDCDDEDEPTPSAAAETGDDEDCDEDEEPETGDDEECPADDGDEYDTQPATPSNTAQGISAAANTAAVTKTQNNAYPVPKPTGKSSSDKTGSGSKGSNNNAGSNNNYGNAGSNNNNAGSNTVVTSYVTVAAETHYVTVTADAPACTA

SEQ ID NO: 255 - protein, 186 aa, Epicoccum nigrum
  >OSS47865.1 hypothetical protein B5807_06460 [Epicoccum nigrum]
MHSSTVFGLGFFAATALAHGNITSPPARLPGPAMAKVCGQAAVTAINADGTGPLENIPSNGSPKCNIGLCKGAQFADNQKNVQQYAPGEVVQFAAQLPIPHEGPCNISLVDTATNTMIETLLVFDSYADENLAQLPLNNTQFSVAMPTDLPTGQCTQPGECTMQWFWFGTNAQQTYENCVDFVMTA

SEQ ID NO: 256 - protein, 187 aa, Phialocephala scopiformis
  >XP_018077275.1 hypothetical protein LY89DRAFT_575639 [Phialocephala scopiformis]
MRSQLLTFAFATLSAGHGIVTNPTSRSAGNAMKAVCGQQVTNNLQSNEYGDIQQLSQIGSSQPDFNATTCEVSLCKGLQFDDNSANVQTFTPGQVVPITVDIQAKHTGTCNVSVVDTATNTMIRNELIYFPVYASTSTELPKNNTQFDITMPDVSSQCGTAGACVVQWWWDSRESDQTYMSCVDFTM

SEQ ID NO: 257 - protein, 184 aa, Colletotrichum higginsianum
  >XP_018163721.1 Chitin binding protein [Colletotrichum higginsianum IMI 349063]
MRASVTSATALLATMVSAHGNIVSPPARAAGAAMAAACGEANVQAVTTDPTIPLEDLTNPPATCQVDLCRGAKFEDNAANVQTFKPGEVVQMKAAIPIPHEGPMNVSVVDTATNKVIGEPLIVFDTYADEKLPQLPANNTDFSVTMPNLPAGTCAQGGQCVLQWFWVGTSAKQTYESCVDFVMG

SEQ ID NO: 258 - protein, 193 aa, Schizophyllum commune
  >XP_003031133.1 hypothetical protein SCHCODRAFT_235685 [Schizophyllum commune H4-8]
MFSKAFVALSALLVVPHVIAHGVVTSPTPRTTGAASEAACGSAVVKKLGSDKYGPIQDAQDKADADYDEAACSIYFCRGYKYEDNTDKVQTYSVGDVVAFKVDMEAHHTGIANVSVVDNASQSTIGEPLKNWPVYADDTLGPADWPPDETDFSVTIPDVTEQCSEAGACAIQWWWYGTKNDQTYESCVDFVIG

SEQ ID NO: 259 - protein, 188 aa, Aspergillus sydowii
  >OJJ54652.1 hypothetical protein ASPSYDRAFT_35332 [Aspergillus sydowii CBS 593.65]
MLSSITVVMLAAILGVHGHAVVDDPPPRKTGPAHEAACGLAVVDVLEGDIAGPIENAVAEADDDYNCNAYLCRGYQFEDNSDNVKVVKGGDVLYFHIDLIAGHHPGYANVSIVETATNEVVGEPLRTWDNWPDHLSGPPRDDIDYNVTIPSSLGAPCDVAGNCVIQWYWYASGNEQTYESCQDIYVEV

SEQ ID NO: 260 - protein, 186 aa, Ascochyta rabiei
  >KZM26691.1 viral capsid [Ascochyta rabiei]
MYCSTILSTGLFAATVFAHGNITSPPARLPGPAMAKVCGQAAVTAINADGTGPLENIPSNGSPQCNIGLCKGAQFADNQKNVQQYAPGEQVNFAAVLPIPHEGPCNISIIDTASNTMVQTLLVFDSYADENLAQLPPNNTKFSVSMPTDLPAGSCTQPGACTMQWFWFGTNAQQTYENCVDFVMTA

SEQ ID NO: 261 - protein, 299 aa, Fusarium avenaceum
  >KIL89151.1 hypothetical protein FAVG1_07545 [Fusarium avenaceum]
MKNAAALLTLLPLVAAHGFIKSPTPRKPGNAFKAACGEQPFYQQSSDINGNVQGIKQVVGNSFDAADCNLWLCKGFQFDDNKDNVQSYKLGEKIPFEINIAAPHTGYANVSVVKTSSDSMIGEPLIEFENYASNAGTAANNTAFSVTLPESLGGDCTKAGDCVLQWFWDAPDIDQTYEACVDFVVGGSGSGSGSGSTQPKPTSAPVATSAAAEKPVPTTLQAVAVTTSIVPSTTEAPVSGDDEDCDDEEPATGADDEDCDDEEEPPVSDQSAEDEDCDDEEPATGDEDEECPADEGDDY

SEQ ID NO: 262 - protein, 185 aa, Ophiocordyceps australis
  >PHH82456.1 hypothetical protein CDD82_5954 [Ophiocordyceps australis]
MKTGALITIASCAAAVSAHGMIREPPARATGPAMVKACGRQAVASVNADDTIPLEDVVAPLPSCKLNLCRGATWQDNKSLLQLLSAGDIVNFQVDLAIPHEGPCNVSIVDTKTNSVIGQPLISFDSYADEKLARLPANNTNFDVVMPQLRQNQCKQPGRCVLQWFWVGTAARQTYESCVDFVMTA

SEQ ID NO: 263 - protein, 302 aa, Rhizoctonia solani
  >CUA71060.1 hypothetical protein RSOLAG22IIIB_04454 [Rhizoctonia solani]
MFNKIAALTFVSALVGQVMGHGLITSPPIRQVGDAFKTNCGDQMFYNVQGDAAGNIQQLEKLKSSSFSADKCNLSLCKGLQFADASTANIQSWTAGQVVPIEYNIRAPHTGTANVSIVDTASNTVIGTPLKVFEVYASTSSPITANQTSFSVTIPNLGSKCSTAGACVLQMWWDARSIDQTYESCVDFTQGGSGSGAPATAEPAATAKTTTAAGPTTAAGPTTTAPTTVVEPTNVAPATSAAQTTKAAPTTSTPTCNSKLQTRQIPVNAKFARCGGKGWFGTTTCPQGLTCHAYNAYYSACI

SEQ ID NO: 264 - protein, 190 aa, Corynespora cassiicola
  >PSN70549.1 hypothetical protein BS50DRAFT_662797 [Corynespora cassiicola Philippines]
MFCKVATLVAFAAGISSVASHALIDVPAPRKAGPAFEERCGAAVVKELEKDIAGPIENAMAKADSSYKCDAYLCRGYQYEDNTDNVQAYKAGDVVDFHVNLVAGHRPGYANISVVDLAANKIIGEPLIEWGYWPCNSKNPCDNDIDFNVTIPDSLASTCAEGGQCALQWYWIATDKPQTYESCLDFTVSV

SEQ ID NO: 265 - protein, 276 aa, Phialocephala scopiformis
  >XP_018075724.1 hypothetical protein LY89DRAFT_681896 [Phialocephala scopiformis]
MQYTSTILATSAALITSVSAHGFLTSPQPRMPGSAMEAACGTQVYDNQASDNYGNIQGELQVAASQTDYNAAECDIWLCKGYKYADNTDNVQSWTAGQVVDMTFDIRAPHTGYANVSIVNTATNTIIGDMLLYYSDFADNAKTIPANETSFSITVPNDLGDTCSTAGACVLQHYWNAESIDQTYESCIDFTVGGSGSSSVSSSSPVVASSTSASSSVLASTSAQVVSSTPAAVVTSSSTRVSPSTLQTVVKSSSVVASPTSSAAVPTETPDDDDEC

SEQ ID NO: 266 - protein, 210 aa, Sphaerulina musiva
  >XP_016764217.1 hypothetical protein SEPMUDRAFT_147759 [Sphaerulina musiva SO2202]
MKYLAACLTILELVSAHGYFEAPLGRKPGNAFSAACGAQANSMMSSDINGNIQGLQNLVASQSDYDPTKCDFWTCKGMKFEDNTDSVQTYTAGQQVPLYFNIRAPHSGYANVSIIDTTSNSMIAANLSAWDEYALTSIPAKTEWTNFTITIPSDIGTQCSTAGKCAIQMHWNAPPPVDQTYQSCIDFTVGASGGSNASSKKRNVAKSFAA

SEQ ID NO: 267 - protein, 291 aa, Stemphylium lycopersici
  >KNG51028.1 chitin binding protein [Stemphylium lycopersici]
MKSFTVAAAIAGFASSVAAHGYISEPAPRMPGDGLKAACGDQVYNTQSSDHYGNIQGALQNLQGDHPDCRMWQCKGIPFSDAGEIFEYTAGQKIPMKVEIRAPHDGSANVSIVNIATDKVIGEPLISWDEYALTSSPMSAHPDWTSFEITMPDVSSECANKGDCVIQWFWDAPSIDQTYESCIDFTMGGGSGNSAPSAPESSAAPVASSAPAASSAAPSSTVPEATATPTPTAVEEVATPVATGGSDSSLPETFTIDTFITWLRANAGTGVADKVRRMVAAKRAHPRAFRV

SEQ ID NO: 268 - protein, 322 aa, Ceratocystis fimbriata
  >PHH55085.1 hypothetical protein CFIMG_002777RA [Ceratocystis fimbriata CBS 114723]
MKSSVFSIISMASVVYGHGRVTSPPSRAPGPAFEAACGQSMYNQMTSDPNGNIENMLQNKAANYDLNTCQLPLCRGYKFDDNKDNVQSYTAGQTIDFQVDIAAPHTGIANVSVVDTSSVSTIGEPLISWTNYASSQTGVAANNSVFSVVLPSGLPSICGTAGNCVLQWWWFSEVAQQTYISCVDFTTGSGGSDTGNGGTAPSSAAPSSTYAPSAGNTPAVNTPAGNTPAGNTPAAPTTLKTSTSASSASTPQPEYGAPANDPAILTAADPTTAPTTAPTTPQANPVAPTGVQPTTPGSKPTSSCKRRRAIRNSGRMYKGASR

SEQ ID NO: 269 - protein, 273 aa, Gaeumannomyces tritici
  >XP_009228852.1 hypothetical protein GGTG_12687 [Gaeumannomyces tritici R3-111a-1]
MQSLSVASLLLAAATGVFGHGRVLTPLAREAGDAFKQNCGEQMFNNVKGDPNGNIQQLAQQAPRQGFDASKCQLELCKGIPFSDNNKPERIQKFSPGQKVDFNVAITAPHSGICNVSVVDTTSNSIIGTPLIEFDNYASTKTGVAKNNTNFSVTMPASLPEKCGTAGACVLQWFWDSPIEAKQTYISCVDFAFSGAGSGATPQPAPSAPSAPSAPSAPSAPSGGNSTAGTGSGTGTAPSPATSSGANAGSRPSNRGSGAKSGSGSNSRECSGR

SEQ ID NO: 270 - protein, 295 aa, Thermothelomyces thermophila
  >XP_003665669.1 chitin-binding domain protein [Thermothelomyces thermophila ATCC 42464]
MHRLAYLVSLLPVVAAHGFVSSPPARRPGSAYRATCGEQPFYQQSSDINGNVQGIQQVVGKDMTDACNLWLCKGFVLDDNKDQVQSFSLGQTIDFKVNIAAPHTGYANVSVVKTSTNTVIGEPLIEFDNYASNNGVAANNTAFSVKLPSNLGGSCTTAGDCVLQWFWDAPDINQTYEACVDFTVGSGSGSGTSASPTDPTTTATPTSAPSTSSSSAAAATTTTTSAAAPPTSTEGAAPTTTATPVPNDEGDDEECPVDDDGEEDNDGEDDNADEECPADNGEDDEDGDKCIADDE

SEQ ID NO: 271 - protein, 311 aa, Fusarium pseudograminearum
  >XP_009253146.1 hypothetical protein FPSE_01751 [Fusarium pseudograminearum CS3096]
MKNAAGILAFLPLVAAHGFIKSPTPRMPGDAYKAACGDQPFYQQSSDINGNVQGIKQVVGQDFKAADCNLWLCKGFQFDDNKDNVQKYSLGEKIPFEINIAAPHTGYANVSVVKTSSDTMIGEPLIEFENYAANAGTASNNTAFSVTLPTSLGGDCTKAGECVLQWFWDAPDINQTYESCVDFVVGAGSGSAPAPSSGSGAEKPATSTPAAEQPAATSAAAEADDEDCDDEEEPVASTTAVAEKPAATTLQAVAISSAADSGSAQPTAAPGSDDDEDCDDEEPIADEDEDCDEEDDQNAGDDDEECPADDY

SEQ ID NO: 272 - protein, 203 aa, Magnaporthiopsis poae
  >KLU87222.1 hypothetical protein MAPG_06224 [Magnaporthiopsis poae ATCC 64411]
MWAKLAAVSFLAAHVSAHGNITSPPARLTGPAMAKACGQAAVDTILADGTNPIEKLVNVPATCNPFLCRGAQFDDNKSRVQTFTPGQVINMKAILPIPHEGPCNVSIVQTATNKVLGQPLIVFDSYADENLKVLPANNTDFNITFPSDLPPQTCTVGGECVVQWFWFGTNAKQTYESCIDFVVAPAAGAAAVAKPKTKPRALF

SEQ ID NO: 273 - protein, 272 aa, Alternaria alternata
  >XP_018383147.1 hypothetical protein CC77DRAFT_941100 [Alternaria alternata]
MKSYTVAAAIAGFASSVAAHGFISEPAPRMPGDGLKAACGDQVYNTQSSDHYGNVQGALQNLQGDHPDCRMWQCKGVPFSDAGEIFEYTAGQVIPMKVEIRAPHDGVANVSIVNIATDKVIGKPLISWDEYALTSSPMSQHPDWTSFDITMPDVSTECANKGDCVIQWFWDAPSIDQTYESCIDFTMGGGSGSGSGSSPAPSASAKPSASASPAATPVATGGSDSGSDSSLPESFTIDTFITWLRANAGTGVADKVRRMVAAQRAHPRAFRV

SEQ ID NO: 274 - protein, 284 aa, Bipolaris maydis
  >XP_014080006.1 hypothetical protein COCC4DRAFT_59571 [Bipolaris maydis ATCC 48331]
MKSYVIATAIAGFASSVAAHGNIVNPTPRKAGNGLKQACGDQVFNTQNSDMYGNVQGSIQNFQGSRPDCRIWQCKGIPFSDHTQVYSYTPGEVVKMNVTIRAPHDGHANVSVIDLATDKVIGKPLISWDKYALTSVPLSQHPEWTDFSITMPDVSDHCNKAGVCAIQWFWDAPTINQTYESCVDFTMGAGSGSDSGSGNSTAPAPSPVDNSGSAPATSPSASPVPVEGSSSDSGSNSGSGSALPKTFTLDTFITWLRTNAGSGVANKVRSVMAAGGVHPRAFRG

SEQ ID NO: 275 - protein, 300 aa, Bipolaris victoriae
  >XP_014551365.1 hypothetical protein COCVIDRAFT_20355 [Bipolaris victoriae FI3]
MKSYAIAAAIAGFASSVAAHGSIVTPTPRKAGDGLKEACGDQVFNTQNSDMYGNVQGSIQNLQGSHPDCRIWQCKGVPFSDHTEVYSYTPGQKVPMTVTIRAPHDGLANVSIIDLATDKVIGKPLISWDKYALTSVPLSQHPEWTDFSITMPDVSDHCNKAGVCAIQWYWDAPTINQTYESCIDFTMGAGSGSGSDSGAGNSTTPAPTPSPVDNSGSAPATSPSASPAPVENSNSDSGSAPAPSQGSGSGSNSGSGSGLPKTFTIDTFITWLRANAGSGVANKVRSVMAAGGVHPRAFRG

SEQ ID NO: 276 - protein, 300 aa, Bipolaris sorokiniana
  >XP_007694321.1 hypothetical protein COCSADRAFT_32533 [Bipolaris sorokiniana ND90Pr]
MKSYVIATAIAGLASSVAAHGSIVSPTPRKAGDGLKQACGDQVFNTQNSDMYGNVQGSIQNLQGSHPDCRIWQCKGVPFSDHTEVFSYTPGQVVNMTVTIRAPHDGLANVSIIDLATDKVIGKPLISWDKYALTSVPLSQHPEWTDFSITMPDVSDHCNKAGICAIQWYWDAPTINQTYESCVDFTMGAGSGSGSGSGNSTAPAPAPSPVDNSGSAPATSPSASPVPVENSNSDSGSAPAPSSAPSQGSGSNSGSGSALPKTFTIDTFITWLRANAGSGVANKVRSVMVAGGVHPRAFRG

SEQ ID NO: 277 - protein, 298 aa, Bipolaris oryzae
  >XP_007693724.1 hypothetical protein COCMIDRAFT_31167 [Bipolaris oryzae ATCC 44560]
MKSYVIATAITGFASSVAAHGYVASPNARKPGDGLKQACGDQVFNTQNSDMYGNVQGSIQNLQGSHPDCRIWQCKGIPFSDHAEIYSYTPGQVVNITVTIRAPHDGRANVSVIDLATDKIIGKPLISWDKYALTSVPLSQHPEWTDFSITMPDVSDHCNKAGTCAIQWYWDAPTINQTYESCIDFTMGAGSGSDSGSGSDNSTTPAPAPSPVDNSGSAPAASPSASPVPVENSNSGSGSAPAPSQGSGSSSGSGSGLPKTFTIDTFITWLRANAGSGVANKVRSVMAAGGVHPRAFRG

SEQ ID NO: 278 - protein, 281 aa, Ascochyta rabiei
  >KZM23951.1 viral capsid [Ascochyta rabiei]
MKSYSAVVALAGLVSSVAAHGYISSPTPRMPGDGLKAACGDQVYNQQSSDHFGNVQGALQNLQGSHPDCRMWQCKGVPFADAGEVFSYTAGQVVPMKIEIRAPHDGVANVSVVNIKTDKVIGKPLISWDKYALTSSPMSEHPDWTSFDVTMPDVSSECAEAGDCVIQWYWDAPTINQTYESCIDFKMSGRSGSGSSSGSGSSPAPASSSAPAASSTATPTKPATPSAKPTAAGSSSTLPEQFTIEQFISWLEANAGSSAVQKLRRAIQARTARTHARAFSG

SEQ ID NO: 279 - protein, 192 aa, Auricularia subglabra
  >EJD39590.1 hypothetical protein AURDEDRAFT_91435 [Auricularia subglabra TFB-10046 SS5]
MFASFILTCLVFATSAFAHGVVTSPAPRRAGTQLTNVCGTGPAQVLSNDVTAPIENAVKQVSAATTADCSLFFCRGLQLADNLDLVQTFPAGTVVPMTINIRVRHIGPANVSIVNTKTQSLMGPALFSWPVFADPAAAADPPKNETSFSVTIPDLGGQCAQLGACSIQWWWFGSQVKQTYESCIDFVQPLDE

SEQ ID NO: 280 - protein, 300 aa, Bipolaris zeicola
  >XP_007717502.1 hypothetical protein COCCADRAFT_109820 [Bipolaris zeicola 26-R-13]
MKSYAIAAAIAGFASSVAAHGNIVTPTPRKAGDGLKEACGDQVFNTQNSDMYGNVQGSIQNLQGSHPDCRIWQCKGVPFSDHTEVYSYTPGQKVPMTVTIRAPHDGLANVSIIDLATDKVIGKPLISWDKYALTSVPLSQHPEWTDFSITMPDVSDHCNKAGVCAIQWYWDAPTINQTYESCIDFTMGAGSGSGSDSGAGNSTTPAPTPSPVDNSGSAPATSPSASPAPVENSNSDSGSAPAPSQGSGSGSNSGSGSGLPKTFTIDTFITWLRANAGSGVANKVRSVMAAGGVHPRAFRG

SEQ ID NO: 281 - protein, 207 aa, Pseudomassariella vexata
  >ORY67281.1 hypothetical protein BCR38DRAFT_482904 [Pseudomassariella vexata]
MKSQSLIAGAALLVAGASAHGNITSPPARIPGPAMAAACGDAAVANVEADGTIPLENVLPTGASCQLDLCRGATFADNAAQVQTFTPGQVVAMTVDIPIPHEGPMNVSIVDTKTNTVVGGPLIEFESYADEALAVLPANNTAFSVTMPTDLAAGTCAVAGDCVLQWFWFGTGAKQTYESCVDFVMGNATATASCDASSARVRRRYVA

SEQ ID NO: 282 - protein, 189 aa, Cylindrobasidium torrendii
  >KIY68190.1 hypothetical protein CYLTODRAFT_421860 [Cylindrobasidium torrendii FP15055 ss-10]
MFTKCFLITALAAIGASAHGVVTTPTPRGTGSTHKAACGAAVAKKLTDDLTGPIENSLAVVDSSTTDACNLLQCRGFTYADNKAKVQTYSVGDVVDFEIDLVAHHTGYANVSVIDLASNTAIERLFTWPVYADSTLGPSKWPKNDTEFSVTIPDVSSECATAGACAIQWFWYATENSQTYESCVDFVIG

SEQ ID NO: 283 - protein, 301 aa, Alternaria alternata
  >OWY49859.1 chitin binding protein [Alternaria alternata]
MKSYTVAAAIAGFASSVAAHGFISEPAPRMPGDGLKAACGDQVYNTQSSDHYGNVQGALQNLQGDHPDCRMWQCKGVPFSDAGEIFEYTAGQVIPMKVEIRAPHDGVANVSIVNIATDKVIGKPLISWDEYALTSSPMSQHPDWTSFDITMPDVSTECANKGDCVIQWFWDAPSIDQTYESCIDFTMGGGSGSGSGSSPAPSASAKPSASASPVASSAPAASSAAPSSTVPEATPTPTAAEEAATPVATGGSDSGSDSSLPESFTIDTFITWLRANAGTGVADKVRRMVAAQRAHPRAFRV

SEQ ID NO: 284 - protein, 259 aa, Marssonina coronariae
  >OWP06150.1 hypothetical protein B2J93_789 [Marssonina coronariae]
MHSSAILAAAALVTAVAAHGSITTPLPRAAGENYKTVCGQQVYNNQAADRNGNIQGVLQVANGQTDVTPACNVWLCKGFTFEDNTANVQTYTPGQVVPITFNLAAPHTGTANMSIVNTASNTIIGSPLLSWDVYASTSVPISSSETSFSITIPSDLGSQCATAGACVIQHFWDARSVDQTYESCIDFTVAGSGSDPAGAPPVTPATTPAANPPATTPPSTPATTPPAAPPAALTTLRTSVTSAAAPPGVTPYGTDDCDL

SEQ ID NO: 285 - protein, 188 aa, Meliniomyces variabilis
  >PMD39368.1 hypothetical protein L207DRAFT_429097 [Meliniomyces variabilis F]
MHSQILSLAFATLAVGHGIITSPTARSAGAAMEAVCGQQVTNNLQSNEYGDIQQLIQIGSSQQDFDPASCDVSLCKGLQFDDNTANIQNFTAGQVVPIKIDLQAKHTGTANVSIVDTASNTMISKQLIYFPVYASTATDIPKNQTQFNITIPDVSSQCNTAGACVVQWWWDSRESNQTYMSCIDFSMT

SEQ ID NO: 286 - protein, 296 aa, Sclerotinia borealis
  >ESZ96996.1 chitin binding protein [Sclerotinia borealis F-4128]
MQYTTAILLTAAGLISSASAHGRILTPTPRSPGAAMASACGTQVEGNQASDPNGNIQGMLQVAASQTDYDAAACNIWQCKGYKYADNTDKVQSWTAGEVVPFTFDVAAPHTGTANISIVDTASNTVIKQLLYYSVFASTATGVTANETKFSVTIPEDLGTQCSTAGACIIQHWWDAASIDQTYESCVDFTVGGSAAGSSSSAAVSSVASSTIVASTVAASSSSSVAVVGSSSSAVVSSVSSVAAVITSTASGAVQTTTFAALPTTLATITKASTTSSAAAVATSAAAEEDDDTCDA

SEQ ID NO: 287 - protein, 267 aa, Meliniomyces bicolor
  >XP_024735330.1 putative chitin binding protein [Meliniomyces bicolor E]
MKCSSSVLAAAAGMMATASAHGFITSPQARLAGSAMKAACGTQVYNQQASDNYGNIQGELQVAATQTDYNAAECNIWLCKGFKYSDNTANVQTWTAGQVVDFTFDVRAPHTGYANVSIVNTATNTIIGDQLLYYSDFADNAKPIPANETSFSITIPSDLGDSCSTAGSCVVQHYWNAASINQTYESCVDFVVRGLGSGPSSSYFTVATPLSSSRVTTSTSAPVPTIPITLSSAVPTTLQTTVSSASSTSVPVAAAASSTPYDGEYTC

SEQ ID NO: 288 - protein, 186 aa, Pseudomassariella vexata
  >ORY59314.1 hypothetical protein BCR38DRAFT_351950 [Pseudomassariella vexata]
MLTAAAVLFALAGVSGHAVMQDPVPRGTGPAQVELCGSALTTALEKDLAGPIEDAVAKADADYNCNAYLCRGYQYEDNVDNVKNVTAGEVMYFHIDLVAGHHPGYANVSVVDLATNEIIGDPLRSWGYWPNATSGPPRDDIDFNVTIPTNLGSTCDAGGKCAIQWYWYASGNEQTYESCLDFYVEA

SEQ ID NO: 289 - protein, 186 aa, Colletotrichum chlorophyti
  >OLN82379.1 hypothetical protein CCHL11_09762 [Colletotrichum chlorophyti]
MLFTHAVLVALATAVLGHGVVQTPEPRTSGPKQEELCGLAVTSQLESDAAGPIENAIKVADSDYKCNLFLCRGYQYEDNEENVRAVKAGESIPFHIDLVAGHRPGYANISVVDLASNTVIGEPLVAWADWPTDNPDPLADTDFNVTIPDTLASSCDVGGKCAIQWFWYAKTNKQTYESCIDFYIEA

SEQ ID NO: 290 - protein, 196 aa, Dothistroma septosporum
  >EME41735.1 hypothetical protein DOTSEDRAFT_111083, partial [Dothistroma septosporum NZE10]
KTTTISALAGIFTVTNAHGYFQSPKGRVPGDSFKSACGEQAYSMMSSDINGNIQGLQTLTANQADYDPSQCHLWTCKGMKYADNTANIQTYTAGQEVPLYFQIVAPHSGVANVSVIDLKTDAGTLIGEPMVKWEEYAMTSTPMKAAWQNFTIKMPTDLGSKCADKGACAIQMHWNAASVDQTYQSCIDFTMAGSAS

SEQ ID NO: 291 - protein, 299 aa, Parastagonospora nodorum
  >XP_001804100.1 hypothetical protein SNOG_13899 [Parastagonospora nodorum SN15]
MKSYTAAVALAGLVSSVAAHGFIKSPIARQPGPGLKAACGDQVFNTQNSDKYGNVQGSIQNLQGSHPDCRIWQCKGVPFADAGEIFSYTPGQKIPIEVEIRAPHDGSANMSIVSVKSDKVIGEPLISWDKYALTSSPMSQHPDWTNFEITMPDVSAECANAGDCVIQWFWDAPTINQTYESCIDFKMGGGSGTSPAPAPASSAPPAASSAPASSAAPTPTKPTPTSAPSKVAEVSTPSPAAGYGTGYETGSGSGSSAMPKTFTVASFIAWLQENAGTETAGKLRRMIAAGGEHARAFRV

SEQ ID NO: 292 - protein, 188 aa, Amanita thiersii
  >PFH48257.1 hypothetical protein AMATHDRAFT_150314 [Amanita thiersii Skay4041]
MKLFVTAFFSLFSIVVGHAVVTKPIPRALGPAALDACGLSVYNVLKSDKYGPIENAANKEESSYNAAACHLFFCRGYQFADNTNNVATYPAGAIVDFHVDIEAHHTGTANVSLVDLASQTTFGSMLFYWPVYANDTLGPIDWPKNETDFSATIPDVGTRCANPGACAIQWWWYAYNNQTYESCIDFVQ

SEQ ID NO: 293 - protein, 185 aa, Colletotrichum orbiculare
  >ENH88634.1 chitin binding protein [Colletotrichum orbiculare MAFF 240422]
MRASVTAATALLAVMVSAHGNIVSPPARAAGAAMAKVCGQESVKTVTADPTIPLEDITNPPATCKLDLCRGAVFEDNKANVQQFKAGQKVAMKAAIPIPHEGPMNVSIVDTKTNKVIGDPLIVFDTYADEKLPKLPANNTDFDVTIPANLPAGSCVKAGQCVLQWFWVGTAAKQTYESCVDFVVA

SEQ ID NO: 294 - protein, 355 aa, Fusarium oxysporum
  >PCD38432.1 hypothetical protein AU210_006906 [Fusarium oxysporum f. sp. radicis-cucumerinum]
MKNAAALLTLLPLVAAHGFVKSPPPRKPGNAFKAACGEQPFYQQSADINGNVQGIKQVVGSNFDAKDCNLWLCKGFQFDDNKDNVQSYKLGEKIDFDVNIAAPHTGYANVSVVKTSTDKMIGEPLIEFENYAANAGLNPNNTAFSVTLPESLGGECTKAGDCVLQWFWDAPDIDQTYESCPSSAASAAPVATSAPAAEKPATTLEAVAVTSSALGPVFESVTTATGDDEDCDEDEEPETGDDEECPADDGDEYDTQPATPSNTAQGISAAANTAAVTKTQSNAYPVPKPTGKSSSDKTGSGSKGSNNNAGSNNNYGNAGSNNNNAGSNTVVTSYVTVAAETHYVTVTADAPACTA

SEQ ID NO: 295 - protein, 311 aa, Fusarium culmorum
  >PTD10602.1 hypothetical protein FCULG_00008900 [Fusarium culmorum]
MKNAAAILALLPLVAAHGFIKSPAPRRPGDAYKAACGDQPFYQQSSDINGNVQGIKQVVGQDFKAADCNLWLCKGFQFDDNKDNVQKYSLGEKIPFEINIAAPHTGYANVSVVKTSSDTMIGEPLIEFENYAANAGTASNNTAFSVTLPTSLGGDCTKAGECVLQWFWDAPDINQTYESCVDFVVGAGSGSAPAPSSGSGAEKPATSAPAAEQPAATSAAAEADDEDCDDEEEPVASTTAVAEKPAATTLQAVAISSAADSGSAQPTSAPGSDDDEDCDDEEPIADEDEDCDEEDDQDAGDDDEECPADDY

SEQ ID NO: 296 - protein, 273 aa, Glarea lozoyensis
  >XP_008081657.1 hypothetical protein GLAREA_12685 [Glarea lozoyensis ATCC 20868]
MQYSSFILAAASGLITSVTAHGAISSPTPRVAGPAMAAACGQQVFNNQASDSFGNIQGELQVASSQSDYDEAACNIWQCKGYKFEDNAAANIQSWTAGQVVDFKFDVRAPHTGTANVSIVETATNSIIGDMLVVYSNFADNARPTSANDTAFSITVPAGLESTCGTAGACVLQHYWDARSIDQTYESCVDFTIGAGGAAPPAASSAVASSSAAPATSAVASPATSVAAPVTEVPAATSAVAVPTTLQTLTRPATTAAAPVATAAPVEEDDEDC

SEQ ID NO: 297 - protein, 403 aa, Penicilliopsis zonata
  >XP_022580149.1 hypothetical protein ASPZODRAFT_498040 [Penicilliopsis zonata CBS 506.65]
MKYSSAVLTLSGLVTLVHGHGFVTSPQARMPGAAMEAACGTQIYDNQEADNYGNIQGELQVADSTYNATACDIWLCKGYKYEDNTDNVYTYSAGEVIPFVVDIRAPHTGTANVSIVKTSTDTMISSILKYWSVYASVSTTIPYNNTNFNITMPDDLGDECTTGGECVIQWFWNAESIDQTYESCIDFTLSGSGSSSSSSSSSSSGSSSVSVASAAASTVATDAVVASSASPADSASTTAAASVESISSAPAAAAEPATSSAAAVVVSVDASSAAGTTTSAAAVIVQASSSSSAKTKHTACPASKNKKKNKASSTAAQASSTQPTTLATVVKQAYTTSAAAAAGASTPSAEASSGSTSGSTSPSTTVSSSSSSSGSAVAMPTGSPTQMLTWISALLKTILNYDN

SEQ ID NO: 298 - protein, 184 aa, Verticillium longisporum
  >CRK15817.1 hypothetical protein BN1708_011560 [Verticillium longisporum]
MLSSIALASAIMATTISGHGNLVKPPPRVPGPAMEAACGQQNVDSVLADSGIPLENFRNVPATCQLDLCRGATFADNTDRVQTFTAGQVVPITAEIPIPHEGPCNVSLVDTASNTVIGLPLILFQSYADENLAQLPPNNTAFEVTIPQLQPGQCTLAGECTMQWFWFGTNAQQTYESCVDFVLA

SEQ ID NO: 299 - protein, 186 aa, Stachybotrys chartarum
  >KFA52333.1 hypothetical protein S40293_00645 [Stachybotrys chartarum IBT 40293]
MFAKTAILSLFAAGVLGHAVVETPEPRRPGSASDALCGAAVSSVLRRDLAGPIEEASKVADADYACDVYACRGYQFEDNESALQTYQAGDVVSFHVDLIAGHRPGYANVSVVDPVNNVVIGEPLKTWAAWPVNNPGPDRDDINFNVTIPDTLGSVCTEGGNCVIQWYWYATGNRQTYESCIDFIVA

SEQ ID NO: 300 - protein, 186 aa, Stachybotrys chlorohalonata
  >KFA60086.1 hypothetical protein S40285_09294 [Stachybotrys chlorohalonata IBT 40285]
MFAKTAILSLFAAGVLGHAVVETPEPRRPGSASDALCGAAVSSVLRRDLAGPIEEASKVADADYACDVYACRGYQFEDNESALQTYQAGDVVSFHVDLIAGHRPGYANVSVVDPVNNIVIGEPLKTWAAWPVNNPGPDRDDINFNITIPDNLGSVCTEGGNCVIQWYWYATGNRQTYESCIDFIVA

SEQ ID NO: 301 - protein, 305 aa, Pyrenochaeta
  >OAL45384.1 hypothetical protein IQ07DRAFT_648617 [Pyrenochaeta sp. DS3sAY3a]
MKSYTSVAALAGFVSSVAAHGFISSPQPRLPGDGLKAACGDQVFNQQNSDRYGNVQGALQNMQGSHPDCRMWHCKGVPFSDAGEIFSYTAGQVIPMTVEIRAPHDGVANVSIVKTSSDTVIGAPLISWDKYALTSSPISQHPDWTSFDITMPDVSTECANAGDCVIQWYWDAASIDQTYESCIDFKMGGGSGSAPAPVPSASAPAPSASAAPSAAPSSAPSAAPVPAESAAPTPTTPAATPVPTPADDAATPTPTAGSGGDSSIPQTFTLDTFITWLRANAGSDVANKVRRMVAAKRAHARAFRV

SEQ ID NO: 302 - protein, 275 aa, Diplocarpon rosae
  >PBP16257.1 hypothetical protein BUE80_DR013058 [Diplocarpon rosae]
MHYTSTILAAAGLITSVAAHGSISEPPPRAAGENYRSVCGEQVYNQQASDRNGNVQGVLQVARSQTDVTPECNVWLCKGFTLADNTANVQSYTAGQVVPITFNLAAPHDGVANVSIVHTASNTIIGSALKSWDVFASPATPITSADTSFSITIPSDLGSQCATAGDCVIQHFWDARSVDQTYESCIDFTVGGSGSPPADNPPATTPAAVPATTPPAGNPPATTPPAVPAVPATTPPPAIPQLSHLLQYRQYLRQLLQRPRPPSKLPPIALLRLQL

SEQ ID NO: 303 - protein, 294 aa, Pyrenophora tritici-repentis
  >XP_001939406.1 conserved hypothetical protein [Pyrenophora tritici-repentis Pt-1C-BFP]
MKSFTVVAAIAGLATSVAAHGLVSSPTPRKPGAGLKAACGDQVFNTQNSDPYGNVQGSIQNLQGSHPDCKIWQCKGVPFADKTEVFQYTAGQKIDMKVEIHAPHDGLANVSVVSTSTDKIIGKPLISWDKYALTSVPMSQHPEWTSFSITMPDVSSECSKAGDCVIQWWWDAPTINQSYESCIDFTMGGGSGSSPATPVESSAPASSTTPEASATPTPSPAEPTASPAASPESGSGSGSGSNTGSGSGSGSSVPKTFTIDTFVEWLRTNAGSSAAQKVRRMIAAQRPHPRAFAV

SEQ ID NO: 304 - protein, 184 aa, Verticillium longisporum
  >CRK25080.1 hypothetical protein BN1708_014125 [Verticillium longisporum]
MLSSIALASAILATTISGHGNVVTPPARVTGPAMVAACGQQNVDSVLADSGIPLENFRNIPATCQLDLCRGATFADNTDRVQTFTAGQVVPITAEIPIPHEGPCNVSLVDTATNTVIGPPLILFQSYADENLAQLPPNNTAFEVTIPQLQPGQCTLAGECTMQWFWFGTNAQQTYESCVDFVLA

SEQ ID NO: 305 - protein, 305 aa, Setosphaeria turcica
  >XP_008025594.1 hypothetical protein SETTUDRAFT_135655 [Setosphaeria turcica Et28A]
MKAYSVAIAIAGFASSVAAHGYVTSPNVRMPGLGLKAACGDQVYNNEFSDHYGNVQGARQNLQGSHPDCRLWQCKGIPFSDHGEIQQYKPGQKVEMKVDIRAPHDGVANVSIVNTATDTVIGKPLISWDKYALTSQPLSQHPEWTSFDFTLPDVSFECCKEGSCVIQWFWNAASIDQTYESCVDFVMCGGSGTSNTSPSPAGGSSSAPQPSPASSMDTSGSNTSPKPNNGGYVTGYGSGSGSGSGAGSGSGSSSGSGSGSSSALPKTFTLDTFITWLRKNAGTGTANRLRRMVAAGGVHPRAFRA

SEQ ID NO: 306 - protein, 184 aa, Verticillium longisporum
  >CRK45912.1 hypothetical protein BN1723_016609 [Verticillium longisporum]
MLSSIALASAILATTISGHGNVVTPPARVTGPAMVAACGQQNVDSVLADSGIPLENFRNIPATCQLDLCRGATFADNTDRVQTFTAGQVVPITAEIPIPHEGPCNVSLVDTATNTVIGPPLILFQSYADENLAQLPPNNTAFEVTIPQLQPGQCTQAGECTMQWFWFGTNAQQTYESCVDFVLA

SEQ ID NO: 307 - protein, 297 aa, Epicoccum nigrum
  >OSS44146.1 hypothetical protein B5807_11196 [Epicoccum nigrum]
MKSYAAAVAIAGFASSVAAHGFISSPTPRMPGDGLKAACGDQVYNTQNSDKYGNVQGSLQNFNGDHPDCKMWQCKGVPFSDASEIFSYTAGQVIPMKVEIRAPHDGVANVSIVNTKTDKIIGEPLISWDEYALTSSPMDKHPDWTSFDITMPDVATECAEKGACVIQWFWDAPSIDQTYESCIDFTMGSGSGSGSSPAPSASAKPSASAAPASSAAPASSAPAATSAAAEATPTATSAPAAPSATGSAGSADELPEQFTIEQFVSWLEKKAGSGAASKLRRAIAARTARTHARAFRN

SEQ ID NO: 308 - protein, 199 aa, Galerina marginata
  >KDR72409.1 hypothetical protein GALMADRAFT_213393 [Galerina marginata CBS 339.88]
MRSLTGSNLVVAFAAALLQAGGALGHGRVTSPTPRAYGNAALAACGNAVLTTLKSDLTGPIENSVKKIDSAYNATACHLYFCKGAQWEDNTSNTRVYKPGSSVEFLFDLVAHHTGTANVSIVDVTTQKTIGSPVFYWPVYANDSLGPPDWPANQTDFKITIPTTLGSQCTTKGKCAIQFWWWAYSNGQTYENCVDFTTV

SEQ ID NO: 309 - protein, 191 aa, Pleurotus ostreatus
  >KDQ22744.1 hypothetical protein PLEOSDRAFT_1109843 [Pleurotus ostreatus PC15]
MKFSVSLVSLVAAASSVAAHGVITTPSPRVVGAANQAACGTGAYTVLKSDKAGPIENAVAKIDSSFDAQACQLFFCKGYQLEDNIKNTRKYAPGTVVPIHVDLIAHHTGSANVSVVNLATQETIGKPLFLWPVYANDSLGPSAWPKNETDFEITIPDLGSQCSTVGACAIQWWWYASKVRQTYESCIDFTQ

SEQ ID NO: 310 - protein, 294 aa, Sclerotinia sclerotiorum
  >XP_001587306.1 hypothetical protein SS1G_12336 [Sclerotinia sclerotiorum 1980 UF-70]
MQYTSTILMAISLITSVSAHGRILSPTPRAPGPAMTSACGQQVEINQASDPNGNIQGMLQVANSQKDYNAAECNIWQCKGYKYADNKDKVQSWTAGQVVPFQFDVVAPHTGTANISIVSTADNKVLKQLLYYDVFASTATGVKPNQTSFSITIPTDLGDQCAVAGACVVQHFWDARSIDQTYESCVDFTVGGTGTGSGSSSSTGSASASAGSSAAVSSIAAPASSSVPIVASSVSSVAAIATSAAASSSIPVLTTSFAPLPTTLVTMTRASTTSSAVAVATSAAGVEDDDTCDA

SEQ ID NO: 311 - protein, 197 aa, Sporothrix insectorum
  >OAA65683.1 Chitin-binding, domain 3 [Sporothrix insectorum RCEF 264]
MKTSTTSTAAAVVSLLAVSVAAHGNITSPAARLTGPAMVAACGQAAVDAVLKDGTIPLEDVTSPLPSCQLDLCRGAMFEDNQDLVQTFQPGQVINMTAQLPIGHAGPMNVSIVSTANNSILSAGANLIEFAIYADETLPAFPPNNTAFSVTMPVELDANACTVAGDCVLQWFWFGTNAKQTYESCVDFVLVSADQVL

SEQ ID NO: 312 - protein, 291 aa, fungal
  >GAM87548.1 hypothetical protein ANO11243_055740 [fungal sp. No.11243]
MTMYRSLFAAAALIASAAGHGMLTSPSPRLPGPLMVATCGQQAANQDTYGNIQALLQTAQNQPDYHPAECMAWLCKGYTYADNTAKLQHYTVGQVVPMAFDVRAPHTGVANVSIVNTATNQIIGQPLKSYASFASNQVGVQPDELSFSVTIPDVGTQCATPGACVIQHYWNAASIDQTYESCIDFVVGAGGAVGSSSSAAGSSSSSSAASASTATTSATSASTATTSSAAVTTSSATSVSSTSAVLATTQSMCSGTTTSYGATVTVTHDGKGCELIQWAVWSAQTIGFLSI

SEQ ID NO: 313 - protein, 184 aa, Verticillium alfalfae
  >XP_003005405.1 conserved hypothetical protein [Verticillium alfalfae VaMs.102]
MLSSIALASAILATTISGHGNLVTPPPRVPGPAMVVACGQQNVDSVLADSGIPLENFRNVPATCQLDLCRGATFTDNTDRVQTFAAGQVVPITAEIPIPHEGPCNVSLVDTASNTVIGLPLILFQSYADENLAQLPPNNTAFEVTIPQLQPGQCTQAGECTMQWFWFGTNAQQTYESCVDFVLT

SEQ ID NO: 314 - protein, 288 aa, Valsa mali
  >KUI59520.1 hypothetical protein VP1G_06750 [Valsa mali var. pyri]
MYKQITAAALFVAGVSAHGRVTSPTPRPLGDAMKAACGAQVWNQMSSDPNGNIQTMAQVGASQSDFDAAECHLWQCRGYQFADATSSTIQSYTAGQTVDFSVDIAAPHTGVANVSVINLAENSVIGSALASWSDYASTATGVTANETSFSVTIPSDLPSACSTAGGCALQWWWDARSIDQTYMSCVDFTVGSGSDSSSGSSSGSSSSSAVAQTSSAAAVTSAAAVQTTSSSSATTLSTVVASSSTEVAVAAASTSVAAAASSASASSASGSSCSKRRAARRAALAARA

SEQ ID NO: 315 - protein, 188 aa, fungal
  >GAW16675.1 hypothetical protein ANO14919_061110 [fungal sp. No.14919]
MKYTFASLLSLAAINGAQSHAVMQSPVPRGTGPKQVELCGSLVTTVLERDLAGPIENAVNSADSNYNCNAYLCRGYQYEDNEDNVQAVKAGDVLTFHIDLVAGHHPGYANVSVVDLASNTVIGDPLVSWDNWPDSKSGPPRNDTDFEATIPDTLATACDVGGKCAIQWYWWSISNSQTYESCLDFYVE

SEQ ID NO: 316 - protein, 174 aa, Meliniomyces bicolor
  >XP_024730152.1 hypothetical protein K444DRAFT_493752, partial [Meliniomyces bicolor E]
TIANGHGIITSPTARSAGAAMKAVCGQQVTDNLQSNEYGDIQQLIEIGASQKDFHPASCDVSLCKGLQFDDNSANIQNFTAGQVVPIKVDIQAKHTGTANVSIVDTASNTMISKQLIYFPVYASTATDIPKNQTQFNITMPDVSSQCSTAGVCVVQWFWDSRESDQTYISCIDF

SEQ ID NO: 317 - protein, 190 aa, Eutypa lata
  >EMR65433.1 putative chitin binding protein [Eutypa lata UCREL1]
MFATLAKAAFLSTLTAAVWGHAVLETPAPREGGPVHEAQCGAAVADKLEDDLAGPIEGALALADDDYNCDVYLCRGYTYEDNVDNVQVVKAGEVIDFHIDMVAGHRPGSANISIIDLAANTIVGEPLKTWAEWPGNNTGPDRDDINFSVTIPESAGESCAEAGLCALQWFWFVPKGHQTYESCLDFYVEA

SEQ ID NO: 318 - protein, 296 aa, Valsa mali
  >KUI71883.1 hypothetical protein VM1G_07470 [Valsa mali]
MYKQITAAALFVAGVSAHGRVTSPTPRPLGDAMKAACGAQVWNQMSSDPNGNIQTMAQVGTSQSDFDAAECHLWQCRGYQFADATSSTIQSYTAGQTVDFSVDIAAPHTGVANVSVINLAENSVIGSALASWSDYASTATGVTANETSFSVTIPSDLPSACSTAGGCALQWWWDARSIDQTYMSCVDFTVGSGSGSSSSSSSGSSSSAVASSSSAVAQTSSAAAATSAAAAVQTTSSSSAPTTLSTVVASSSTEVAVAAASTSVAAAASSASASSASGSSCSKRRAARRAALAARA

SEQ ID NO: 319 - protein, 298 aa, Leptosphaeria maculans
  >XP_003836961.1 hypothetical protein LEMA_P124370.1 [Leptosphaeria maculans JN3]
MKSYSAAVALASFVSSVAAHGYISSPKPRMPGNGLKEACGEQVYNNQFSDHFGNVQAALQNMQGSQPNCRMWQCKGIPFSDSAEVFSYTAGQVIPMKVEIRAPHDGHANVSIVKTSSDTVIGSPLISWDEYGLTSVPLSSRPEWLSFDITMPDVSSECTTPGECVIQWFWDAPTINQTYEACIDFTMGGGSGSGTSPAPASSAPPASSTPAATPSPAPAKPATAAAPSTESGGSGSTVPKSFTVDSFVSWLKSSSNVPETFTMDTLISWLKTNAGSDVANKVRRMVALTRPHPRAFQV

SEQ ID NO: 320 - protein, 187 aa, Chaetomium globosum
  >XP_001219485.1 hypothetical protein CHGG_00264 [Chaetomium globosum CBS 148.51]
MLLQAALFSLGAVGALAHAVVKTPTPRKAGALSEELCGAAVSTVLNRDLAGPIENAVEVADADYNCNAYVCRGYQYKDNEASLHTFQAGDIVDFHIVLVAGHRPGYANVSVIDPVNNVVLGSPLKTWEEWPINSTNPIQDDVDFNITIPERLASICTEGGKCAIQWYWYAIRGSQTYESCVDFVIVA

SEQ ID NO: 321 - protein, 192 aa, Leucoagaricus
  >KXN83778.1 hypothetical protein AN958_01105 [Leucoagaricus sp. SymC.cos]
MKTNTIFTSTLAALPVVLGHGRVTSPPTRGLGDANLAKCGTAVNRVLKSDLYGPIENSAAKIDADYDAKACHLFFCKGYQLEDNLDKVQTFKGGQVVNFLVDIEARHTGKANVSVVDLVTQTTVGAPLFNWPVYTNNSLGPPDWPKNETDFNVTIPSNLGDKCNEAGKCAIQWWWYAFNVQTYESCVDFVIA

SEQ ID NO: 322 - protein, 253 aa, Diaporthe ampelina
  >KKY34087.1 putative chitin binding [Diaporthe ampelina]
MYKQISAAALFAAGVSAHGRVTSPTPRPLGDAMKAACGNQVWNMQSSDSNGNIQTMAQIGTSQSDFDATKCHLWQCRGYQFDDATADSIQSFTAGQEVPFVVDVAAPHTGVANVSVIDLGANSVIGDALISWDSYASTATGVQPGDENFSVTIPSDLPATCATKGGCALQWWWDAREIDQTYMSCVDFVVGGASGSGSASSSSAAPAATTTTAAATTSSVPAAAAAAEPTAAAESDDSSTCTKRRKTRRAFRA

SEQ ID NO: 323 - protein, 246 aa, Diaporthe helianthi
  >POS70783.1 hypothetical protein DHEL01_v210823 [Diaporthe helianthi]
MYKQISAAVLFAAGVSAHGRVMSPTPRPLGDAMKSACGNQVWNMQSSDSNGNIQTMAQIGTSQSDFDATKCHMWQCRGYQFDDATDASIQSFTPGQTVPFVVDVAAPHTGVANVSVIDLAANSVIGEALMSWDSYASTETGIKPGDENFNITIPSNLPPTCAGKGGCALQWWWDARSIDQTYMSCVDFVVAGASGSGSSPAPDPTAVAPTSSVPANVAPAASAPTAAASDDSPACTKRKTRRAFRA

SEQ ID NO: 324 - protein, 280 aa, Pyrenophora teres
  >EFQ95112.1 hypothetical protein PTT_06977 [Pyrenophora teres f. teres 0-1]
MKSFTIAAAIAGFASSVAAHGLISSPTPRKAGAGLKAACGDQVFNTQNSDPYGNVQGSIQNLQGSHPDCKIWQCKGVPFADKTEVFQYTAGQKIDMKIEIHAPHDGSANVSVVSTSTDKIIGKPLISWDKYALTSVPMAQHPEWTSFSITMPDVSTECAKAGDCVIQWWWDAPTINQSYEACIDFTMGGGSDSGSSPSTPANSTAPIPAEPIASPAASPESGSGSDSGSNTGSGSGSSVPRTFTVDTFVDWLRTNAGSSAAQKVRRMIAAQRPHPRAFAV

SEQ ID NO: 325 - protein, 298 aa, Stagonospora
  >OAK93491.1 hypothetical protein IQ06DRAFT_95050 [Stagonospora sp. SRC1lsM3a]
MKSYTAAIAVAGFASSVAAHGFISSPTPRQPGQGLKAACGDQVFNQQSSDKYGNVQGALQNLQGSHPDCRMWHCKGVPFEDAGEVFSYTAGQKIPMTVEIRAPHDGVANVSIVKTSSDTVIGQPLISWDKYALTSTPLSAHPEWTSFDITMPDVSADCAKAGDCVIQWFWDAPSIDQTYESCIDFKMGGGSGSAPSTPTTPGNSTEPASSPSPVKSSTPTADPLATSTPSKVGEVAAPTSTAGAGSGSGSGSGTGATPQTFTITTFIAWLKENAGSDAANKVRRMVAAKGAHARAFRV

SEQ ID NO: 326 - protein, 185 aa, Pestalotiopsis fici
  >XP_007840693.1 hypothetical protein PFICI_13921 [Pestalotiopsis fici W106-1]
MQSTSIICAAALLVMGASAHGNITSPPARLPGPAMAAACGAQAVASVEADGTIPLESVSGASATCQLDFCRGATFEDNVDLVQTFTPGQVVAMTAILPIPHEGPMNVSIVDAATNAVIGDPLIEFDSYADESLASLPANNTDFSVTIPQLEAGQCAQAGDCVLQWFWFGTSAQQTYESCVDFVLA

SEQ ID NO: 327 - protein, 184 aa, Ophiocordyceps australis
  >PHH61828.1 hypothetical protein CDD81_7931 [Ophiocordyceps australis]
MKTRTLITIASCAAAVAAHGMIREPPARATGPAMVKACGKQAVASVDADDTIPLEDVVAPLSTCKLDLCRGATWQDNKNLLQLLSAGDIVNFQIDLPIPHEGPCNVSVVDTQTNSVIGEPLISFDSYADEKLAKLPANNTNFDVVMPQLDKDECKKPGRCVLQWFWVGTAAKQTYVSCVDFVMT

SEQ ID NO: 328 - protein, 186 aa, Stachybotrys chartarum
  >KEY67076.1 hypothetical protein S7711_09968 [Stachybotrys chartarum IBT 7711]
MLFLTSLLSFVAARALGHAVVESPTPRKPGKLFDTQCGAGLTRILRRDLASPIEDALRSADANYNCNAYVCRGYQYESNGALHTYNAGESVNFHINLVAGHRPGYANVSVIDPVKNVVISSPLKTWADWPITNPGPDRDDLDFSITIPDDLGSICTEGGKCAIQWYWYSLSNSQTYESCVDFVVSA

SEQ ID NO: 329 - protein, 186 aa, Colletotrichum higginsianum
  >XP_018159537.1 Chitin binding protein [Colletotrichum higginsianum IMI 349063]
MLFTQAILAVLATSVLGHGVVQDPEPRVSGPKQQELCGTAVTDQLESDTAGPIENAIKVADADYKCNLFLCRGYQYEDNEDNVRAVTAGEVIPFHIDLIAGHRPGHANISVIDLANNTVIGEPLITWDDWPTTNPDPLADTDFNVTIPDTLASACDVGGKCAIQWFWYAETNKQTYESCIDFYVEA

SEQ ID NO: 330 - protein, 425 aa, Stachybotrys chartarum
  >KFA48340.1 hypothetical protein S40293_04432 [Stachybotrys chartarum IBT 40293]
MYRYAILAAAVPMVAAHGFISSPPPRQPGEAYGAACGAQALNQQAADINGNVQGIMQVIDARTISDDCNLWLCKGFLLEDPSLVQSYTLGQTIDFEINIAAPHTGVANVSVVRTSTNSIIGAPLIEFENYASTATGVDPSNRAFSVTLPEDLEGQCTTAGDCVLQWWWDAADINQTYESCVDFTVAGSGSGSPAPAPSVSTPVPSATAPAVTTAITPQPTSTPIEEPIEEDDECPADDEDDEDEEPVEEDDECPADDEEEEDEEPIEDDDECPADDEEEEVEEPIEEVEEPVEEDDECPAEEEDDESGDVDPDEEYDGVDVDEDDECPADEEEEEEEPIEEEDDECPAEDDEEEEPIEEEDDECPAEEEDEEEEPIEDDDECPAEDEEDDYEETLPVVTSAGIYERAPATTLATVVRKAVATAAF

SEQ ID NO: 331 - protein, 428 aa, Stachybotrys chartarum
  >KFA77635.1 hypothetical protein S40288_08780 [Stachybotrys chartarum IBT 40288]
MYRYAILAAAVPMVAAHGFISSPPPRQPGEAYGAACGAQALNQQAADINGNVQGIMQVIDARTISDDCNLWLCKGFLLEDPSLVQSYTLGQTIDFEINIAAPHTGVANVSVVRTSTNSIIGAPLIEFENYASTATGVDPSNRAFSVTLPEDLEGQCTTAGDCVLQWWWDAADINQTYESCVDFTVAGSGSGSPAPAPSVSTPVPSATAPAVTTAITPQPTSTPIEEPIEEDDECPADDEDDEDEEPVEEDDECPADDEEEEDEEPIEDDDECPADDEEEEVEEPIEEVEEPVEEDDECPAEEEDDESGDVDPDEEYDGVDVDEDDECPADEEEEEEEEPIEEEDDECPAEDDEEEEPIEEEDDECPAEEEDEEEEEEPIEDDDECPAEDEEDDYEETLPVVTSAGIYERAPATTLATVVRKAVATAAF

SEQ ID NO: 332 - protein, 426 aa, Stachybotrys chartarum
  >KEY72501.1 hypothetical protein S7711_05174 [Stachybotrys chartarum IBT 7711]
MYRYAILAAAVPMVAAHGFISSPPPRQPGEAYGAACGAQALNQQAADINGNVQGIMQVIDARTISDDCNLWLCKGFLLEDPSLVQSYTLGQTIDFEINIAAPHTGVANVSVVRTSTNSIIGAPLIEFENYASTATGVDPSNRAFSVTLPEDLEGQCTTAGDCVLQWWWDAADINQTYESCVDFTVAGSGSGSPAPAPSVSTPVPSATAPAVTTAITPQPTSTPIEEPIEDDDECPADDEDDEDEEPVEEDDECPADDEEEEDEEPIEDDDECPADDEEEEVEEPIEEVEEPVEEDDECPAEEEDDESGDVDPDEEYDGVDVDEDDECPADEEEEEEEEPIEEEDDECPAEDDEEEEPIEEEDDECPAEEEDEEEEPIEDDDECPAEDEEDDYEETLPVVTSAGIYERAPATTLATVVRKAVATAAF

SEQ ID NO: 333 - protein, 186 aa, Pestalotiopsis fici
  >XP_007836963.1 hypothetical protein PFICI_10191 [Pestalotiopsis fici W106-1]
MAKFLKSFVAIGLVTSVLGHAVLQTPQPRVSGDKQVELCGAAVTTALKKDLAGPIEDALAKDDGTYNCNAYQCRGYQYEDNADNVYNYTVGEFISFHVDLVAGHHPGWANLSAVDLATNTIIGDPLITWADWPISGTNDDINFNTTIPESLAEPCSEAGACILQWYWWSDSNSQTYESCLDFYVTA

SEQ ID NO: 334 - protein, 186 aa, Colletotrichum incanum
  >OHW97971.1 chitin binding protein [Colletotrichum incanum]
MLFTHAIFAALATGVFGHGVVQDPEPRVSGPKQQELCGIAVTDELESDTAGPIENAIKVADADYKCNLFLCRGYQYEDNEDNVRAVTTGEVIPFHIDLIAGHRPGHANISVIDLANNTVLGQPLITWDDWPTTNPDPLADTDFNVTIPDNLASLCDVGGKCAIQWFWYAETNKQTYESCIDFYIKA

SEQ ID NO: 335 - protein, 186 aa, Colletotrichum orbiculare
  >ENH83251.1 chitin binding protein [Colletotrichum orbiculare MAFF 240422]
MLFTHAIVAALATGVMGHAVVQTPEPRTTGPKQEELCGTAVTNNLDSDLAGPIENALKVADSDFKCNIFLCRGYQFEDNAEYVRNVTAGEVIPFHVDLVAGHRPGHANISVIDLANNTIIGEPLLTWADWPTENPDPLADTDFNITIPDTLAEACDVGGKCAIQWFWYAETNKQTYESCIDFAIVA

SEQ ID NO: 336 - protein, 188 aa, Colletotrichum tofieldiae
  >KZL75359.1 chitin binding protein [Colletotrichum tofieldiae]
MLFTHVVFVALATGVFGHGVVQDPEPRVSGPKQQELCGTAVTDQLESDTAGPIENAIKVADADFKCNLFLCRGYQYEDNEDNVRAVTTGEVIPFHIDLVAGHRPGHANISVIDLANNTVLGEPLITWDDWPTTNPDPLADNSADFNVTIPDNLASLCDVGGKCAIQWFWYAETNKQTYESCIDFYVEA

SEQ ID NO: 337 - protein, 464 aa, Stachybotrys chlorohalonata
  >KFA63689.1 hypothetical protein S40285_08366 [Stachybotrys chlorohalonata IBT 40285]
MYRYAILAAAVPMVAAHGFISSPPPRQPGEAFGAACGAQALNQQAADINGNVQGIMQVIDARTISDDCNLWLCKGFLLEDPSLVQSYTLGQTIDFEIDIAAPHTGVANVSVVRTSTNSIIGAPLIEFENYASTATGVDPSNRAFSVTLPEDLEGQCTTAGDCVLQWWWDAADINQTYESCVDFTVAGSGSGSPAPAPSVSTPAPSATAPVVTTAVTPQPTSTPIEEPIEEDDECPADDEEDEDEDEEPVEEDDECPADDEEEEDEEPIEEDDECPADDEEEEVEEPVEEVEEPVEEDDECPAEEEDDASGDVDPDEEYDGVDVEEDDECPADEEEEEEEEPIEEEDDECPAEDDEDEEPIEEEDDECPAEDDEDEEPIEEEDDECPAEDDEDEEPIEEEDDECPAEEDEEDEEPIEDDDECPAEDEEDDYEETLPVVTSAGIYERAPATTLATVVRKAVATAAF

SEQ ID NO: 338 - protein, 194 aa, Agaricus bisporus
  >XP_006457068.1 hypothetical protein AGABI2DRAFT_181426 [Agaricus bisporus var. bisporus H97]
MKLEFIVSLAFATLPVALGHGRVLSPPSRVIGDANLEACGAGVYDVLDDDATAPIENAAAKVGSDYNDLQCHLWFCKGYQFEDNEDRVQRYSTGQVVNFAVDIVARHTGIANVSVVDLASQTTIGKPLFNWPVYTNNSLGPPNWPKNETNFDVTIPSGLDAICDAPNKCAIQWWWNSVYSNHQTFESCVDFVIV

SEQ ID NO: 339 - protein, 188 aa, Thermothelomyces thermophila
  >XP_003663985.1 hypothetical protein MYCTH_2306267 [Thermothelomyces thermophila ATCC 42464]
MAKTLFRLVSFAAALSTVLGHAVVTVPTPRGAGPYYTQRCGETYAVYMEKDKAGPIENGVAKAGSELGCNPFLCRGYQYEDNEAVEYEPGQVIDFHVDLIAGHHPGYANVSIVDLEANKIIGDPLRSWDDYPNATATTPRSDIDFNVTIPNTLGTACSTGGKCAIQWYWYASGNKQSYESCVDFYVKA

SEQ ID NO: 340 - protein, 193 aa, Colletotrichum incanum
  >KZL82471.1 chitin binding protein, partial [Colletotrichum incanum]
LFPSTMLFTHAIFAALATGVFGHGVVQDPEPRVSGPKQQELCGIAVTDELESDTAGPIENAIKVADADYKCNLFLCRGYQYEDNEDNVRAVTTGEVIPFHIDLIAGHRPGHANISVIDLANNTVLGQPLITWDDWPTTNPDPLADNSADFNVTIPDNLASLCDVGGKCAIQWFWYAETNKQTYESCIDFYIKA

SEQ ID NO: 341 - protein, 191 aa, Agaricus bisporus
  >XP_007332106.1 hypothetical protein AGABI1DRAFT_62204, partial [Agaricus bisporus var. burnettii JB137-S8]
LEFIVSLAFAILPVALGHGRVLSPPSRVIGDANLEACGAGVYDVLDYDATGPIENAAAKVGSDYNDLQCHLWFCKGYQFEDNEDRVQRYSTGQVVNFAVDIVARHTGIANVSVVDLASQTTIGKPLFNWPVYTNNSLGPPNWPKNETNFDVTIPSGLDAICDAPNKCAIQWWWNSVYSNHQTFESCVDFVI

SEQ ID NO: 342 - protein, 362 aa, Coniochaeta ligniaria
  >OIW32734.1 hypothetical protein CONLIGDRAFT_276985 [Coniochaeta ligniaria NRRL 30616]
MRASIAAAAFLAATVSAHGNVTSPPARLTGPGMVKACGQSAVDNVLADGTIPLEDVFNALPSCQLDLCRGAVFEDNTARVQKFSLGQVVPFKAILPIAHEGPANVSIVKTATNKILGNMLLVFDSYADEKLKVLPANNTNFAVTIPTNLAASDCKLAGECVLQWFWFGTAAKQTYESCVDFVIVSASNSSAGAGSGTTTSVISATSAAATSALAASTSTAALSTPSSVTATSSSIAGFSTTPSMSESSGGSSDGSSSSSNSTSPESGSSGDASSSNDGSSDESSSDDSSSAASAPVDDASIPIPEPAEAAEGAFGGTAGMIPELDADGTPAEDSFGGTQSSIAAVTRRLRRFIRPDDVTSRK

SEQ ID NO: 343 - protein, 186 aa, Colletotrichum orchidophilum
  >XP_022478079.1 hypothetical protein CORC01_03765 [Colletotrichum orchidophilum]
MLFTHAILAALAAGVFGHGVVQTPEPRAAGAKQEELCGTAVTNKLDSDTAGPIENSLAVADADYKCNLYQCRGYQYEDNEDNVRAVKAGEVIPFHIDLVAGHRPGHANISVIDLANNTIIGEPLISWSDWPTTDPDPLADTDWNITIPDTLASACDVGGKCAIQWFWYAETNKQTYESCVDFYIEA

SEQ ID NO: 344 - protein, 639 aa, Elsinoe australis
  >PSK55957.1 hypothetical protein B9Z65_4835 [Elsinoe australis]
MKSYTTILAAAGLIASVSAHGIITDPAPRGPGPAFQAACGMQAYYQVSSDPNGNVQGLLNIATQQPDYKAADCRAYMCKGLKYADNTDKVQRYTAGQVVPITFATRAPHTGTANVSIVRTSDDTVIGQPLKSWDNFAPNAGGASPDQASFTVTIPDTGSQCTEPGACILQHFWDANKPDIDQTYESCVDVVISGGSGGAPAPAPSSSAPAVTSAAAPVASSSTQPPVQPVTTTAAPVTTTRASTTRRPRPTNTCACNAPVVKRQDSCNPTATVTVTEAAATDAASTPGGYGSTITRTATVTVPATATITNTVTITPPAEVTVTQTLTQTSTITSAVTVTASTSRVIIAPTTSSSVSAPFTYPNATAPVQNPALPGTTVNEASTSLATSASFTFNPLPTGATTVTVTSSSTAAPFPTATSANSSTADAVPTGTGVTSRPAATLSAYPTVPVGGDSTANPVPTSSSASVSVPIGTGVTSVPAGTLPGSSPAPYPTSTFTNTNPDGTSTANGVTSAPSLPTGTGVISSIASLTSLIPTASLNSTIPTGTGVYSSLSSLISSLPTASGSPGYGSMPPRPTPGSGSSIADLLRWIADLITRAKAEKEAGATPSAPAPSATPAAGGAPVPYVYRRAARDFRPFNA

SEQ ID NO: 345 - protein, 262 aa, Glarea lozoyensis
  >EHK97285.1 hypothetical protein M7I_6915 [Glarea lozoyensis 74030]
MQYSSFILAAASGLITSVTAHGAISSPTPRVAGPAMAAACGQQVFNNQASDSFGNIQGELQVASSQSDYDEAACNIWQCKGYKFEDNAAANIQSWTAGQVVDFKFDVRAPHTGTANVSIVETATNSIIDNARPTSANDTAFSITVPAGLESTCGTAGACVLQHYWDARSIDQTYESCVDFTIGAGGAAPPAASSAVASSSAAPATSAVASPATSVAAPVTEVPAATSAVAVPTTLQTLTRPATTAAAPVATAAPVEEDDEDC

SEQ ID NO: 346 - protein, 191 aa, Panaeolus cyanescens
  >PPQ71532.1 hypothetical protein CVT24_006481 [Panaeolus cyanescens]
MKLAALATAATLVGLVSGHGRVTTPTARVLGTKAQERCGAGAYKVLNSDKAAPIENAVAKIDSGYNAALCPLFFCRGHQFDDNTSNVQKYTPGQQVRFLVDIVAHHTGTANVSIVNLASQTTIGKPLFAWPIYTNNSLGPDQWVKNETDFTVTIPTNLGTTCSTPGACAIQWWWYAFNKQTYESCVDFVTV

SEQ ID NO: 347 - protein, 186 aa, Colletotrichum fioriniae
  >EXF86178.1 hypothetical protein CFIO01_02237 [Colletotrichum fioriniae PJ7]
MLFTHAILAALATSVLGHGVVQTPEPRTTGAKQEELCGAAVTKKLDSDIAGPIENSLAVADADYKCNLFQCRGYQYEDNEDNVRVVKAGEVIPFHIDLVAGHRPGHANISVIDLANNTIIGEPLISWSDWPTTDPDPLADTDWNITIPDTLASACDVGGKCAIQWFWYAETNKQTYESCIDFYIGA

SEQ ID NO: 348 - protein, 186 aa, Colletotrichum simmondsii
  >KXH47331.1 hypothetical protein CSIM01_05268 [Colletotrichum simmondsii]
MLFTHAILAALATSVLGHGVVQTPEPRTTGAKQEELCGAAVTKKLDSDIAGPIENSLAVADADYKCNLFQCRGYQYEDNEDNVRVVKAGEVIPFHIDLVAGHRPGHANISVIDLANNTIIGEPLISWSDWPTTDPDPLADTDWNITIPDTLASACDVGGKCAIQWFWYAETNKQTYESCVDFYIGA

SEQ ID NO: 349 - protein, 284 aa, Rutstroemia
  >PQE28048.1 chitin binding protein [Rutstroemia sp. NJR-2017a WRK4]
MQYTSAILLAAAGLISSVAAHGSIASPTPRQPGAAMATACGQQVEVNQASDHNGNIQGMLQVANSQSDYNAAECDIWLCKGYKWEDNKDLLQTYTAGQVVPIAFNVAAPHTGTANVSIVDTATNTVIEQLLYYPVFASTATGVTSNETLFSITIPSTLGDKCSTGGACVIQHYWNAASIDQTYESCIDFVVGGSGSSSGSSSSAVASSAVATSSAVVSSVVASSAVASSSAVVTSAASSAGVITSSFAALPTTLATVVKPSTTSSVAAVQTSAAAGEDDDSCDA

SEQ ID NO: 350 - protein, 197 aa, Sporothrix schenckii
  >XP_016591301.1 hypothetical protein SPSK_07972 [Sporothrix schenckii 1099-18]
MKTSMASTAAAVVSLFAASAAAHGNITSPPARLTGPGMVAACGQTAVDAVLKDGTIPLEDVLSPAAGCQLDLCRGAVFADNTDRLQTFQPGQLVNMTAQIPIAHEGPMNVSIVSTANNSILATGANLIVFDSYADESLPALPPNNTAFSVTIPADIAEDACLVAGDCVLQWFWFGTNAKQTYESCVDFVIASVDQVL

SEQ ID NO: 351 - protein, 297 aa, Botrytis cinerea
  >XP_001559518.1 hypothetical protein BCIN_05g06830 [Botrytis cinerea B05.10]
MQYTSTILMAAGLITSVSAHGSILTPKPRIPGAAMAAACGQQVEVNQASDHNGNIQGMLQVAASQSDYDAAACNIWQCKGYKYADNTDLVQSWTAGQVVPFTFNVAAPHTGTANVSIIDTAANTVIKQLLYYDVFASVSTGVTSNETSFSITIPDDLPSTCATPGGCVVQHWWDAASIDQTYESCVDFTVGSASGSGSASSAVASSAVASSTVAASSAVVASSSSIAVVASSSAVASSVSSVAAIATSAAVSSAAQTTTFAALPTTLATVTKASSTSSAAAVATSAAPEEDDDTCDA

SEQ ID NO: 352 - protein, 185 aa, Colletotrichum orchidophilum
  >XP_022476151.1 hypothetical protein CORC01_05692 [Colletotrichum orchidophilum]
MRGSIIAATALLAALVSAHGNIVSPPPRGVGAAMAAACGQANVKAVTADPTIPLEDFTSPPATCQLDLCRGAKFEDNKANVQTFKAGQVVNMKAEIPIPHEGPMNVSIVDTAKNKVIGQPLIVFDTYADEKLAQLPENNTAFPVTMPSNLAAGTCAKAGQCVLQWFWVGTAAKQTYESCVDFVMA

SEQ ID NO: 353 - protein, 185 aa, Exidia glandulosa
  >KZV99119.1 hypothetical protein EXIGLDRAFT_640869, partial [Exidia glandulosa HHB12029]
VAVLAAVTTVVGHGVVTSPTPRALGSAAQSACGTGVYTVLNATDKYGPIENAQKKIDSSYNATACHLFFCRGYQFSDNKSNVKTYPAGTSVAFHVDLEAHHTGYANVSVVDLSKQKIIGTPLKTWSVYANDSLGPADWPPDETDFTVTVPNLSGACATAGACAIQWFWWAYNGQTYESCIDFTQA

SEQ ID NO: 354 - protein, 186 aa, Colletotrichum nymphaeae
  >KXH42091.1 hypothetical protein CNYM01_05750 [Colletotrichum nymphaeae SA-01]
MLFTHAILAALATSVLGHGVVQTPEPRTTGAKQEELCGAAVTKKLDSDIAGPIENSLAVADADYKCNLFQCRGYQYEDNEDNVRVVKAGEVIPFHIDLVAGHRPGHANISVIDLANNIIIGEPLISWSDWPTTDPDPLADTDWNITIPDTLATACDVGGKCAIQWFWYAETNKQTYESCIDFYVGA

SEQ ID NO: 355 - protein, 186 aa, Colletotrichum salicis
  >KXH56748.1 hypothetical protein CSAL01_03192 [Colletotrichum salicis]
MLFTHAIFAALATGVFGHGVVQTPEPRTTGAKQEELCGAAVTKKLDSDIAGPIENSLAVADADYKCNLFQCRGYQYEDNEDNVRAVTAGEVIPFHIDLVAGHRPGHANISVIDLANNTIIGEPLISWSDWPTTDPDPLADTDWNITIPDTLASTCDVGGKCAIQWFWYAETNKQTYESCIDFYIGA

SEQ ID NO: 356 - protein, 185 aa, Colletotrichum fioriniae
  >EXF73783.1 hypothetical protein CFIO01_05714 [Colletotrichum fioriniae PJ7]
MRASITAATALLAALVSAHGNIVSPPARGVGAAMAAACGQANVKAVTADPTIPLEDFTNPPATCQLDLCRGAKFEDNKANVQTFKAGQVVNMKAEIPIPHEGPMNVSIVDTATNKVIGQPLIVFDSYADENLAALPKNNTDFDITMPSNLPAGTCAQAGQCVVQWFWVGTAAKQTYESCVDFVMA

SEQ ID NO: 357 - protein, 185 aa, Colletotrichum nymphaeae
  >KXH40494.1 hypothetical protein CNYM01_07941 [Colletotrichum nymphaeae SA-01]
MRASITAATALLAALVSAHGNIVSPPARGVGAAMAAACGQANVKAVTADPTIPLEDFTNPPATCQLDLCRGAKFEDNKANVQTFKAGQVINMKAEIPIPHEGPMNVSIVDTATNKVIGQPLIVFDSYADENLAALPKNNTDFDITMPSNLPAGTCAQAGQCVVQWFWVGTAAKQTYESCVDFVMA

SEQ ID NO: 358 - protein, 185 aa, Botryobasidium botryosum
  >KDQ07671.1 hypothetical protein BOTBODRAFT_192293 [Botryobasidium botryosum FD-172 SS1]
MYTPAIVALVFAMVQIVAGHGLVTSPAPRGPGPLMKAACGQGIYNTLSSDPYGNVQGALQNRGTDYNASECKMNLCKGSQLESGGPVQNWSAGTNVSVKVDIKAPHTGVANVNIVNYQTGAKLATLMSWSDYASNSHTIPANQTSFSVTIPPVSNCTVPGTCVMQWWWDAHSINQTYISCVDFTQ

SEQ ID NO: 359 - protein, 257 aa, Coniella lustricola
  >PSR97778.1 hypothetical protein BD289DRAFT_361892 [Coniella lustricola]
MYKQLASAALFAAGVNAHGHLVSPEPRPLGSAMEAACGTQVYDMMSSDENGNIQTMAQTGASQSDYNATACHLWQCRGYQFGDATSSTIHSYSAGQTLDFTVDIAAPHTGVANVSVINLAENAVIGDPLISFTNYASTATGVAANNTAFSVTLPDSLPDVCSTSGGCALQWWWDARSIDQTYMSCADFVWTGASSSSSSSSSSASSAVASSAAASSTVAASSSSAATVAASSAVASSTSSCSKKRAARRAALAARKN

SEQ ID NO: 360 - protein, 188 aa, Pseudogymnoascus
  >KFX99248.1 hypothetical protein V490_01876 [Pseudogymnoascus sp. VKM F-3557]
MFITTPIILLLSAAGVWGHARIDSPVPRLTGSAHVSACGSAVATKLESDNTGPIENSVPYIDANYKCNIYLCRGYQYEDNTSRVMALNADDNIPFHINLVAGHKPGYANASVVDTSTNKVVAALKTWDHWPDVTDGSTYDQKTNFNVTIPSGLESTCGTAGKCVIQWYWYAIANDQTYESCHDFYIVS

SEQ ID NO: 361 - protein, 185 aa, Colletotrichum salicis
  >KXH65586.1 hypothetical protein CSAL01_12055 [Colletotrichum salicis]
MRASITAATALLAALVSSHGNIVSPPARGVGAAMAAACGQANVKAVTADPTIPLEDFTSPPATCQLDLCRGAKFEDNKANVQTFKAGQVVNMKAEIPIPHEGPMNVSIVDTATNKVIGQPLIAFDSYADENLAALPKNNTDFDITMPSNLPAGTCAQAGQCVVQWFWVGTAAKQTYESCVDFVMA

SEQ ID NO: 362 - protein, 188 aa, Pseudogymnoascus
  >KFY51579.1 hypothetical protein V497_09028 [Pseudogymnoascus sp. VKM F-4516 (FW-969)]
MFITTPIILLLSAAGVWGHARIDSPVPRLTGSAHVSACGSAVATKLESDNTGPIENSVPYIDANYKCNIYLCRGYQYEDNTSRVMALNADDNIPFHINLVAGHKPGYANASVVDTSTNKVVAALNTWDHWPDVTDGSTYDQKTNFNVTIPSGLESTCGTAGKCVIQWYWYAIANDQTYESCHDFYIVS

SEQ ID NO: 363 - protein, 189 aa, Pseudogymnoascus
  >KFY73490.1 hypothetical protein V499_06433 [Pseudogymnoascus sp. VKM F-103]
MFLTTPIILLSSTVCGVLGHARIDAPTPRLPGNAHISACGSAVAEKLQSDNTGPIENSVPYINSDYKCNAYLCRGYQFEDNTSRVMALNTNDVIPFHINLVAGHKPGRANASVVDTSTNKVVVALKTWDHWPDVTDGSTYDEKTKFNVTIPSGLGSTCGTAGKCVIQWYWYAIANDQTYESCHDFYIVS

SEQ ID NO: 364 - protein, 185 aa, Paraphaeosphaeria sporulosa
  >XP_018035652.1 hypothetical protein CC84DRAFT_1218647 [Paraphaeosphaeria sporulosa]
MLAKALITLTLAALSTAHAVIKTPTPRTAGPTHTSLCGSPVASKLASDPAGPIESAVAKADASYKCDAYLCRGYQWGDNTGRAQSYVAGQVVPFYVDLVAAHKPGWANVSVIDLQTNKAVGTPLKTWSVWPDDVSGGGDDVDFNVTIPGTLGSACNVGGKCALQWYWWSSSNKQTYEGCVDFYVK

SEQ ID NO: 365 - protein, 189 aa, Pseudogymnoascus
  >OBT75557.1 hypothetical protein VF21_05847 [Pseudogymnoascus sp. 05NY08]
MFLTTPIIILSSAVCGALGHARIDTPTPRLTGNAHISACGSAVAEKLESDNTGPIENSIPYINSDYKCNAYLCRGYQFEDNTSRVMALNANDVIPFHINLVAGHKPGYANASVIDTSTNKVVVALKTWDHWPDVTDGSTYDEKTKFNVTIPSGLGSACGTAGKCVIQWYWYAIANDQTYESCHDFYIVS

SEQ ID NO: 366 - protein, 184 aa, Rosellinia necatrix
  >GAP82764.2 putative chitin binding protein [Rosellinia necatrix]
MKYTTAGLVSLAALSGVQGHAVMTSPAPRNTGPKQLERCGAIVTAVLQRDLAGPIENAMKAVDASYNCNAYLCRGYQYEDNVSKLKAVSAGDVLTFHIDLVAGHHPGYANVSVVNLASNTVIGAPLVSWADWPDSTSGPPRNDITIPNTLASACDEGGKCAIQWFWWSISNSQTYESCVDFYVQ

SEQ ID NO: 367 - protein, 188 aa, Pseudogymnoascus
  >OBT70490.1 hypothetical protein VE03_00291 [Pseudogymnoascus sp. 23342-1-I1]
MFLKTPIILLSSAIGVWAHARIDSPTPRLTGNAHKSACGSAVVTKLESDNTGPIENSVPLIGADYNCDIFLCRGYQFEDNTSNILELHTDDVIPFHINLVAGHKPGYANASVVDTSTNTVVVALKTWDHWPDVTDGSTYDQKTNFNVTIPSGLESACGTAGKCVIQWYWYAIANDQTYESCHDFNIVS

SEQ ID NO: 368 - protein, 186 aa, Diaporthe helianthi
  >POS75067.1 hypothetical protein DHEL01_v206548 [Diaporthe helianthi]
MGIFALITAVFAMSAAAHGVIRSPPSRVLGLSMTRLCGQAAFDIARGDVTASLETVAPNITAGCPLTLCRGHQFDDNLDKLSVFRPGQIVPMKIELNILHGGPANVSIVKTATNTLIGPPLIFFDDYGNRDLPSLPPNNTDFAVTMPTTLAETDCRVAGDCVMQWFWSTIDNQTYVGCSDFILFGH

SEQ ID NO: 369 - protein, 189 aa, Moniliophthora roreri
  >KTB42977.1 hypothetical protein WG66_4426 [Moniliophthora roreri]
MFKLPSFTLSILIVRAIAHAVVTDPIPREYGPAAESACGSAVYDVLTSDLTGPIENAEQKIDSSYDAEACHLYLCRGAQFDDNVDNTRIYEPGTKVSMKVNMVAHHTGYANVSVVDLAAQKPISSLFVWPVYADESIGPSKWPKNETDFEVTIPDLEGACADAGACAIQWFWYATSNSQTYESCVDFTQ

SEQ ID NO: 370 - protein, 278 aa, Grosmannia clavigera
  >XP_014174528.1 chitin-binding protein [Grosmannia clavigera kw1407]
MFSQLITVAAIFAAGASAHGRVTSPTPRPLGLNMEDACGQQLYIQMESDPNGNVQNMANNGKSQSDFNATACHLWQCRGFQFSDATSASIQSFTAGEVVPFTVDISAPHTGVANVSVINLAENSVIGSPLASWSVYASTATGVTANETSFSVTIPSDLPSVCSTSGGCALQWWWDARSVDQTYMNCVDFTIGSSGSTSNVAQSSSKASVSTSAAVAATAATTPASTSVSTTAAVTVAANAVSSATTSCPTDVTTTLTMTRSSSVCTPVTTTVTVTVQA

SEQ ID NO: 371 - protein, 189 aa, Moniliophthora roreri
  >ESK91639.1 chitin binding [Moniliophthora roreri MCA 2997]
MFKLPSFTLSILIVRAIAHAVVTDPIPREYGPAAESACGSAVYDVLTSDLTGPIENAEQKIDSSYDAEACHLYLCRGAQFDDNVDNTRIYEPGTKVSMKVNMVAHHTGYANVSVVDLAAQKPISSLFVWPVYADESIGPSKWPKNETDFEVTVPDLEGACADAGACAIQWFWYATSNSQTYESCVDFTQ

SEQ ID NO: 372 - protein, 188 aa, Pseudogymnoascus
  >KFY09580.1 hypothetical protein V492_05439 [Pseudogymnoascus sp. VKM F-4246]
MFLTTPIILLSSAVVGVWGHARIDTPTPRLTGSAHVSACGSAVVTKLESDNTGPIENSVPLINSDTECDIYLCRGYQFDDNTSNVMELNVDDVIPFHINLVAGHKPGYANASVVDTSTNTVVAALKTWDHWPDVTDGSTYDQKTNFNVTIPSGLESACGTAGKCVIQWYWYAIANDQTYESCHDFYIV

SEQ ID NO: 373 - protein, 188 aa, Pseudogymnoascus
  >KFY34529.1 hypothetical protein V494_06692 [Pseudogymnoascus sp. VKM F-4513 (FW-928)]
MFLTTPIILLSSAVVGVWGHARIDTPTPRLTGSAHVSACGSAVVTKLESDNTGPIENSVPLISSDTKCDIYLCRGYQFDDNTSNVMELNVDDVIPFHINLVAGHKPGYANASVVDTSTNTVVAALKTWDHWPDVTDGSTYDQKTNFNVTVPSGLESACGTAGKCVIQWYWYAIANDQTYESCHDFYIV

SEQ ID NO: 374 - protein, 189 aa, Pseudogymnoascus
  >OBT44529.1 hypothetical protein VE00_04914 [Pseudogymnoascus sp. WSF 3629]
MFLTTPIILLSAAVCGVLGHARIDSPTPRLTGNAHISACGSAVAEKLESDNTGPIENSIPYINSDYKCNAYLCRGYQFDDNTSRVMALNTDDVIPFHINLVAGHKPGYANASVVDISTNKVVVALKTWDHWPDVTDGSTYAQKTKFNVTIPSGLGSACGTAGKCVIQWYWYAIANDQTYESCHDFYIVS

SEQ ID NO: 375 - protein, 352 aa, Peniophora
  >KZV71039.1 hypothetical protein PENSPDRAFT_684909 [Peniophora sp. CONT]
MHASTAFLAIGLSLLPGVFGHAGISSPPIRQPGNAFLDKCGKASFNSVKSDVTGHIEEQEPVTDGCELTLCRGMLFEDQPTANVQKVAPGDSMTMEVDCTIPHGGPANVSLVDTTVGGSGEVIGSFLKTFDDFCPTTGQTPADQAKTQFTLPTADVVGDKCQNAGDCVVQLFWATPDFSQNYYYCTLLRMTGVDVAMSSSSNSSSAAATAATSAVKSAAVTTTAVATSSAAATTAVVSSSTAEASTSVESTASASATTDSTSATAAAVAIATDAASTTSAVTSTTSDAVLTAIPVTTPAPVVAAAGAAATSGFSTVVRVVTDTPTSAPTAAVGALAQTSGARRTRRILWFYI

SEQ ID NO: 376 - protein, 186 aa, Colletotrichum gloeosporioides
  >ELA29511.1 chitin binding protein [Colletotrichum gloeosporioides Nara gc5]
MLFTQAVIAALVTGVWGHGVVQTPEPRTTGTKQEELCGTAVTNKLDSDLAGPIENAMAVADADYKCNAFMCRGYQWEDNVDLLMNVTAGQVIPFHIDLVAGHRPGHANISVIDLATNTAIGEPLITWDDWPTENPDPLADTDFNVTIPDTLADSCNVGGKCAIQWFWYAETNKQTYESCIDIAIVA

SEQ ID NO: 377 - protein, 186 aa, Colletotrichum gloeosporioides
  >EQB54384.1 hypothetical protein CGLO_05797 [Colletotrichum gloeosporioides Cg-14]
MLFTQAVIAALVTGVWGHGVVQTPEPRTTGTKQEELCGTAVTNKLDSDLAGPIENAIAVADADYKCNAFMCRGYQWEDNVDLLMNVTAGQVIPFHIDLVAGHRPGHANISVIDLATNTAIGEPLITWDDWPTENPDPLADTDFNVTIPDTLADSCNVGGKCAIQWFWYAETNKQTYESCIDIAIVA

SEQ ID NO: 378 - protein, 189 aa, Pseudogymnoascus
  >KFY25020.1 hypothetical protein V491_01927 [Pseudogymnoascus sp. VKM F-3775]
MFLTTPIILLSSAVVGVLGHARIDSPTPRLTGSAHTSTCGSAVVKKLESDNTGPIENSVPYIDSDYNCDIYLCRGYQFEDNTSNVLELAVDEVIPFHINLVAGHKPGYANASVVDTSTNEVVVALKTWDHWPDVTDGSTYDEKTNFNVTIPSGLESACGTAGKCVIQWYWYAIANDQTYESCHDFYIVS

SEQ ID NO: 379 - protein, 688 aa, Elsinoe
  >PNS20769.1 hypothetical protein CAC42_2700 [Elsinoe sp. CQ-2017a]
MKSYTTVLAAASFVSSVAGHGRFMNPAPRAAGTAFQNACGMQAYYQVSSDPNGNVQGLLNVIRNQPDYKPAACIANLCKGLLYEDNTDKVQRYSAGQVVAMTFDVAAPHTGSANVSVVRTSDNTVIGTPLKSWDNFAPNAGGASPDQEDFTITIPDVGTQCSQPGACVLQHFWDADKPDISQTYESCIDVVIGGGSGEAAPAPAPSSSAEPAPVTVSSSSSQPPVVDPVTTTVAPATTAAPSTTVAPVTTTPAPVSSSTTTRRPIRRPTNTCACPAPAAFKRQASCNPTATVTVTTAGISSSLPAGYASTMTITSTVTAPGASVPVGSDGSPVPTVITSNGQVITVITRTATVTATVTATITDTVTVTPPAETTITSTVTQTSTVTSAVTVTAPTSKINIPPATTGVPAPFPLPNGTLPVQPGTTVIEASTSLPISTSSSSISFTFSPLPTGAYPTGAPFPTGGSSNSSTVNAVPIGTGSTSRPAATLPSYPSVSVPVGGDSASSTGTTSSTSTLPSVPIGTGVTSRPAATLPGSSAAPYPTITSNTNPDGSSTANAPIGTGVVPIGTGVISSIASLTSLIPTSAMNSTIPTNSGVYSSLSSLISALPTASNLPGYPPAPPRPTPGSGSKIADLLRWIADLILRAKAGAGAGGAAPTASPTPSAPLPTRPGTPYVFRRAARDFRPFRA

SEQ ID NO: 380 - protein, 255 aa, Auricularia subglabra
  >EJD41108.1 hypothetical protein AURDEDRAFT_115624 [Auricularia subglabra TFB-10046 SS5]
MLHIAAQAALVLIVCASVATAHALVNSPPVRTPGPAHLKTCGQASFARLNLDPSGHIEEQEPVNAGCDLTLCRGMLFADQPKANVQRVAPGQAMTMEVDCTIPHGGPANVTLLDTTDRGSGRIIGDRFLKTFDDFCPVPGPAPADQTNLQFALPSAEDIGDSCQQDGQCVVQLFWATPDLSQNYYYCVDVTVLASAGNQPDSNGQPTSQAPSTQQSSAIGPEATSINYSSTQTSPELLLPVVLLFTVWSLLSVWR

SEQ ID NO: 381 - protein, 333 aa, Punctularia strigosozonata
  >XP_007380678.1 hypothetical protein PUNSTDRAFT_111414 [Punctularia strigosozonata HHB-11173 SS5]
MRSTVTIILAAAAAIPAVLGHAGITSPPIRQPGNAFLQKCGQTSFNSVKGDPTGHIEEQEPVNAGCDLTLCRGMLFQDQPASNVQKVTPGQQMTMGVDCTIPHGGPANVSLIDTTAGGSGAVIGSFLKTFDNFCPTSGGTPPDQSNLQFNLPSASEVGTKCQNAGDCVVQLFWATPDFSQNYYYCVDVAMNNAASAPSSTAAAVSSSAVAASSSAAVASSSAPATTIAIASSAAAPAPASSSTSVVVVAPSSSANPDAGVATVIVTASPTPDAAATSAADATAAPITSVAVVGSQKMVTVFSTSTAEPQSAATALGAVTSGARRRMRLLWLWI

SEQ ID NO: 382 - protein, 341 aa, Stereum hirsutum
  >XP_007306198.1 hypothetical protein STEHIDRAFT_122996 [Stereum hirsutum FP-91666 SS1]
MVHFASSSSAASAFIFAAFLPTALAHAGITSPPIRSPGQNFLSACGQTSFDSVKGDPTGHIEEQTPVTAGCELTLCRGMLFSDQPASNVQKVTPGQNMAMAVDCTIPHGGPANVSLVDTTAGGSGEVIGSFLKTFDDFCPTSGGTPADQSNLQFTLPNADAVGSKCQTAGDCVVQLFWATPDFSQNYYYCVDVAMAADNSTSSAAASGSASASASSSTSAASSKSAASTSAAASSASVSAASTSSVSSVASSSVASSSAASASASASDAASTATTEVATFVSSVSAVLSTATSTPTSTATRMTTSTVTAGASGTAAEANGAVSTTGALTSGARRRVRLFWF

SEQ ID NO: 383 - protein, 280 aa, Aspergillus japonicus
HGFVTSPQARMPGSAMEKACGQQVYNNQEADNYGNVQGELQIASGQSDYDADACDIWLCKGYKYADNKDNVYSYKAGETVDFTVDIRAPHTGTANVSVVDTASNTVIGSPLIYWSVYASTSTGVTANETSFSVTIPDDLGDKCTEGGACVLQWWWNAASIDQTYESCIDFTVGGSGSSSSSSSSSSSSSSAAASQQTTTTAAAAAVTTPSTANNVAPASSSVPTTLATSVKQSATVAPVAASSAAAAASSSGVSIPTDGTAEEQLTWVASLLKALLKYAN
